(19) United States
(12) Patent Application Publication
(10) Pub. No.: US 2025/0092418 A1
(43) Pub. Date: Mar. 20, 2025

(54) METHODS OF GENETICALLY ALTERING A PLANT NIN-GENE TO BE RESPONSIVE TO AUXIN

(71) Applicant: NIAB, Cambridge (GB)

(72) Inventors: Anindya KUNDU, Cambridge (GB); Richard J. HARRISON, Cambridge (GB)

(73) Assignee: NIAB, Cambridge (GB)

(21) Appl. No.: 18/816,990

(22) Filed: Aug. 27, 2024

Related U.S. Application Data
(60) Provisional application No. 63/579,266, filed on Aug. 28, 2023.

(51) Int. Cl. C12N 15/82; C07K 14/415

(52) U.S. Cl. CPC C12N 15/8294; C07K 14/415; C12N 15/8237

(57) ABSTRACT

Aspects of the present disclosure relate to genetically modified plants comprising NODULE INCEPTION (NIN) and NIN-LIKE PROTEIN (NLP) that have been genetically altered to be responsive to auxin so that the NIN or NLP protein can induce root nodulation upon appropriate signaling.

### CROSS REFERENCE TO RELATED APPLICATION

[0001] This application claims the benefit of U.S. Provisional Application No. 63/579,266, filed Aug. 28, 2023, which is hereby incorporated by reference in its entirety.

### REFERENCE TO AN ELECTRONIC SEQUENCE LISTING

[0002] The contents of the electronic sequence listing (794542002700seqlist.xml; Size: 1,069,688 bytes; and Date of Creation: Aug. 26, 2024) are herein incorporated by reference in their entirety.

### TECHNICAL FIELD

[0003] The present disclosure relates to genetically altered plants. In particular, the present disclosure relates to plants with NODULE INCEPTION (NIN) and NIN-LIKE PROTEIN (NLP) genes that have been genetically altered to be responsive to auxin so that the NIN or NLP protein can induce root nodulation upon appropriate signaling.

### BACKGROUND

[0004] Nodulating plant species, such as legumes, have evolved to form symbiotic relationships with nitrogen fixing bacteria. They form specialized organs called nodules to house these bacteria, which provide an optimal environment for the bacteria to fix nitrogen and provide it to the plant. In turn, the plant provides the bacteria with carbohydrates and other resources. The initial step of nodule formation is the recognition of the presence of symbiotic bacteria, for example by the detection of Nod factors produced by the bacteria. This recognition induces root hair curling, in which a tight curl is formed at the tip of the root hair. This tight curl establishes an infection chamber within which a bacterial colony can form that then extends an infection thread into the root. This infection thread triggers signaling within the root that ultimately results in the production of a new nodule.

[0005] Biological nitrogen fixation requires de novo organogenesis of root nodules where nitrogen fixing filamentous actinorhizal bacteria or rhizobia fix atmospheric nitrogen into ammonia. Genetic screens have identified genes involved in the nodule organogenesis process. Chief among these is the transcription factor NODULE INCEPTION (NIN), belonging to the NLP (NIN-Like Protein) superfamily, which has been shown to have a key role in nodule organogenesis across multiple plant species. While NLPs have recently been reported for their N-sensing capability and role in lateral root organogenesis, it is apparent that the nitrogen fixing plants neo-functionalized one of the NLPs (NIN) to act as a bridge between putative NLP functions and bacterial signal perception to initiate a nodule development program.

[0006] The precise mechanism of NIN involvement in organogenesis has remained elusive, because important components of NIN regulation and integration with nodule organogenesis processes were not known. More importantly, as NIN is the key player in nodule organogenesis, a successful nodule engineering approach needs to incorporate NIN. In order to successfully engineer nodulation, knowledge of NIN regulation will be required. There exists a clear need for identifying NIN regulatory regions that in combination with the NIN coding sequence will allow full regulation of NIN in engineering plants.

### BRIEF SUMMARY

[0007] In order to meet these needs, the present disclosure provides methods of introducing auxin responsive elements (AuxREs) into a regulatory region operably linked with the NIN coding sequence. The present disclosure further provides means of introducing cytokinin-responsive elements into plants operably linked with a NIN or NLP coding sequence that may be endogenous or heterologous.
[0008] 1. A genetically altered plant or part thereof comprising one or more genetic alterations that increase activity of a NODULE INCEPTION (NIN) protein or a NIN-like protein (NLP protein) in response to auxin signaling as compared to a control plant without the one or more genetic alterations.
[0009] 2. The genetically altered plant or part thereof of aspect 1, wherein the one or more genetic alterations comprise addition of one or more auxin response elements (AuxREs) operably linked to a nucleic acid encoding the NIN protein or the NLP protein.
[0010] 3. The genetically altered plant or part thereof of aspect 2, wherein the one or more genetic alterations comprise addition of one or more, two or more, three or more, four or more, five or more, six or more, seven or more, eight or more, nine or more, ten or more, eleven or more, twelve or more, thirteen or more, fourteen or more, fifteen or more, sixteen or more, seventeen or more, eighteen or more, nineteen or more, twenty or more, twenty-one or more, twenty-two or more, twenty-three or more, or twenty-four or more AuxREs.
[0011] 4. The genetically altered plant or part thereof of aspect 2 or aspect 3, wherein the one or more AuxREs comprise a TGTCTC motif or a TGTCTN motif.
[0012] 5. The genetically altered plant or part thereof of any one of aspects 2-4, wherein the one or more AuxREs are added between a cyclops binding site and a transcriptional start site of the nucleic acid encoding the NIN protein or the NLP protein.
[0013] 5b. The genetically altered plant or part thereof of any one of aspects 2-5, wherein the NIN protein or the NLP protein comprises an amino acid sequence with at least 80%, at least 85%, at least 90%, at least 91%, at least 92%, at least 93%, at least 94%, at least 95%, at least 96%, at least 97%, at least 98%, at least 99%, or 100% identity to SEQ ID NO: 649.
[0014] 6. The genetically altered plant or part thereof of any one of aspects 2-5b, wherein the nucleic acid encodes a NIN protein, and wherein the NIN protein has at least 70% sequence identity, at least 75% sequence identity, at least 80% sequence identity, at least 85% sequence identity, at least 90% sequence identity, at least 95% sequence identity, at least 96% sequence identity, at least 97% sequence identity, at least 98% sequence identity, or at least 99% sequence identity to an amino acid sequence selected from the group consisting of SEQ ID NO: 551, SEQ ID NO: 552, SEQ ID NO: 553, SEQ ID NO: 554, SEQ ID NO: 555, SEQ ID NO: 556, SEQ ID NO: 557, SEQ ID NO: 558, SEQ ID NO: 559, SEQ ID NO: 560, SEQ ID NO: 561, SEQ ID NO: 562, SEQ ID NO: 563, SEQ ID NO: 564, SEQ ID NO: 565, SEQ ID NO: 566, SEQ ID NO: 567, SEQ ID NO: 568, SEQ ID NO: 569, SEQ ID NO: 570, SEQ ID NO: 571, SEQ ID NO: 572, SEQ ID NO: 573, SEQ ID NO: 574, SEQ ID NO: 575, SEQ ID NO: 576, SEQ ID NO: 577, SEQ ID NO: 578, SEQ ID NO: 579, SEQ ID NO: 580, SEQ ID NO: 581, SEQ ID NO: 582, SEQ ID NO: 583, SEQ ID NO: 584, SEQ ID NO: 585, SEQ ID NO: 586, SEQ ID NO: 587, and SEQ ID NO: 588.
[0015] 7. The genetically altered plant or part thereof of aspect 6, wherein the NIN protein has at least 70% sequence identity, at least 75% sequence identity, at least 80% sequence identity, at least 85% sequence identity, at least 90% sequence identity, at least 95% sequence identity, at least 96% sequence identity, at least 97% sequence identity, at least 98% sequence identity, or at least 99% sequence identity to an amino acid sequence selected from the group consisting of SEQ ID NO: 578, SEQ ID NO: 579, SEQ ID NO: 553, and SEQ ID NO: 554.
[0016] 8. The genetically altered plant or part thereof of any one of aspects 2-5b, wherein the nucleic acid encodes a NIN/NLP1 orthogroup protein, and wherein the NIN/NLP1 orthogroup protein has at least 70% sequence identity, at least 75% sequence identity, at least 80% sequence identity, at least 85% sequence identity, at least 90% sequence identity, at least 95% sequence identity, at least 96% sequence identity, at least 97% sequence identity, at least 98% sequence identity, or at least 99% sequence identity to an amino acid sequence selected from the group consisting of SEQ ID NO: 1, SEQ ID NO: 2, SEQ ID NO: 3, SEQ ID NO: 4, SEQ ID NO: 5, SEQ ID NO: 6, SEQ ID NO: 8, SEQ ID NO: 9, SEQ ID NO: 10, SEQ ID NO: 11, SEQ ID NO: 12, SEQ ID NO: 13, SEQ ID NO: 14, SEQ ID NO: 15, SEQ ID NO: 16, SEQ ID NO: 17, SEQ ID NO: 18, SEQ ID NO: 19, SEQ ID NO: 20, SEQ ID NO: 21, SEQ ID NO: 22, SEQ ID NO: 23, SEQ ID NO: 24, SEQ ID NO: 25, SEQ ID NO: 26, SEQ ID NO: 27, SEQ ID NO: 28, SEQ ID NO: 29, SEQ ID NO: 30, SEQ ID NO: 31, SEQ ID NO: 32, SEQ ID NO: 33, SEQ ID NO: 34, SEQ ID NO: 35, SEQ ID NO: 36, SEQ ID NO: 37, SEQ ID NO: 38, SEQ ID NO: 39, SEQ ID NO: 40, SEQ ID NO: 41, SEQ ID NO: 42, SEQ ID NO: 43, SEQ ID NO: 44, SEQ ID NO: 45, SEQ ID NO: 46, SEQ ID NO: 47, SEQ ID NO: 48, SEQ ID NO: 49, SEQ ID NO: 50, SEQ ID NO: 51, SEQ ID NO: 52, SEQ ID NO: 53, SEQ ID NO: 54, SEQ ID NO: 55, SEQ ID NO: 56, SEQ ID NO: 57, SEQ ID NO: 58, SEQ ID NO: 59, SEQ ID NO: 60, SEQ ID NO: 61, SEQ ID NO: 62, SEQ ID NO: 63, SEQ ID NO: 64, SEQ ID NO: 65, SEQ ID NO: 66, SEQ ID NO: 67, SEQ ID NO: 68, SEQ ID NO: 69, SEQ ID NO: 70, SEQ ID NO: 71, SEQ ID NO: 72, SEQ ID NO: 73, SEQ ID NO: 74, SEQ ID NO: 75, SEQ ID NO: 76, SEQ ID NO: 77, SEQ ID NO: 79, SEQ ID NO: 80, SEQ ID NO: 81, SEQ ID NO: 82, SEQ ID NO: 83, SEQ ID NO: 84, SEQ ID NO: 85, SEQ ID NO: 86, SEQ ID NO: 87, SEQ ID NO: 88, SEQ ID NO: 89, SEQ ID NO: 90, SEQ ID NO: 91, SEQ ID NO: 92, SEQ ID NO: 93, SEQ ID NO: 94, SEQ ID NO: 95, SEQ ID NO: 96, SEQ ID NO: 98, SEQ ID NO: 99, SEQ ID NO: 100, SEQ ID NO: 101, SEQ ID NO: 102, SEQ ID NO: 103, SEQ ID NO: 104, SEQ ID NO: 105, SEQ ID NO: 106, SEQ ID NO: 108, SEQ ID NO: 109, SEQ ID NO: 131, SEQ ID NO: 132, SEQ ID NO: 133, SEQ ID NO: 134, SEQ ID NO: 135, SEQ ID NO: 136, SEQ ID NO: 137, SEQ ID NO: 138, SEQ ID NO: 139, SEQ ID NO: 140, SEQ ID NO: 141, SEQ ID NO: 142, SEQ ID NO: 143, SEQ ID NO: 144, SEQ ID NO: 145, SEQ ID NO: 146, SEQ ID NO: 147, SEQ ID NO: 148, SEQ ID NO: 149, SEQ ID NO: 150, SEQ ID NO: 151, SEQ ID NO: 152, SEQ ID NO: 153, SEQ ID NO: 154, SEQ ID NO: 155, SEQ ID NO: 156, SEQ ID NO: 157, SEQ ID NO: 158, SEQ ID NO: 159, SEQ ID NO: 160, SEQ ID NO: 161, SEQ ID NO: 162, SEQ ID NO: 163, SEQ ID NO: 164, SEQ ID NO: 165, SEQ ID NO: 166, SEQ ID NO: 167, SEQ ID NO: 168, SEQ ID NO: 169, SEQ ID NO: 170, SEQ ID NO: 171, SEQ ID NO: 172, SEQ ID NO: 173, SEQ ID NO: 174, SEQ ID NO: 175, SEQ ID NO: 177, SEQ ID NO: 178, SEQ ID NO: 179, SEQ ID NO: 180, SEQ ID NO: 181, SEQ ID NO: 182, SEQ ID NO: 183, SEQ ID NO: 184, SEQ ID NO: 185, SEQ ID NO: 186, SEQ ID NO: 187, SEQ ID NO: 188, SEQ ID NO: 189, SEQ ID NO: 190, SEQ ID NO: 191, SEQ ID NO: 192, SEQ ID NO: 193, SEQ ID NO: 194, SEQ ID NO: 196, SEQ ID NO: 197, SEQ ID NO: 198, SEQ ID NO: 199, SEQ ID NO: 200, SEQ ID NO: 201, SEQ ID NO: 202, SEQ ID NO: 203, SEQ ID NO: 204, SEQ ID NO: 205, SEQ ID NO: 206, SEQ ID NO: 207, SEQ ID NO: 208, SEQ ID NO: 209, SEQ ID NO: 210, SEQ ID NO: 211, SEQ ID NO: 212, SEQ ID NO: 213, SEQ ID NO: 214, SEQ ID NO: 215, SEQ ID NO: 216, SEQ ID NO: 217, SEQ ID NO: 218, SEQ ID NO: 219, SEQ ID NO: 220, SEQ ID NO: 221, SEQ ID NO: 222, SEQ ID NO: 223, SEQ ID NO: 224, SEQ ID NO: 225, SEQ ID NO: 226, SEQ ID NO: 227, SEQ ID NO: 228, SEQ ID NO: 229, SEQ ID NO: 230, SEQ ID NO: 231, SEQ ID NO: 232, SEQ ID NO: 233, SEQ ID NO: 234, SEQ ID NO: 235, SEQ ID NO: 236, SEQ ID NO: 551, SEQ ID NO: 552, SEQ ID NO: 553, SEQ ID NO: 554, SEQ ID NO: 555, SEQ ID NO: 556, SEQ ID NO: 557, SEQ ID NO: 558, SEQ ID NO: 559, SEQ ID NO: 560, SEQ ID NO: 561, SEQ ID NO: 562, SEQ ID NO: 563, SEQ ID NO: 564, SEQ ID NO: 565, SEQ ID NO: 566, SEQ ID NO: 567, SEQ ID NO: 568, SEQ ID NO: 569, SEQ ID NO: 570, SEQ ID NO: 571, SEQ ID NO: 572, SEQ ID NO: 573, SEQ ID NO: 574, SEQ ID NO: 575, SEQ ID NO: 576, SEQ ID NO: 577, SEQ ID NO: 578, SEQ ID NO: 579, SEQ ID NO: 580, SEQ ID NO: 581, SEQ ID NO: 582, SEQ ID NO: 583, SEQ ID NO: 584, SEQ ID NO: 585, SEQ ID NO: 586, SEQ ID NO: 587, and SEQ ID NO: 588.
[0017] 9. The genetically altered plant or part thereof of any one of aspects 2-5b, wherein the nucleic acid encodes a NLP2-3 orthogroup protein, and wherein the NLP2-3 orthogroup protein has at least 70% sequence identity, at least 75% sequence identity, at least 80% sequence identity, at least 85% sequence identity, at least 90% sequence identity, at least 95% sequence identity, at least 96% sequence identity, at least 97% sequence identity, at least 98% sequence identity, or at least 99% sequence identity to an amino acid sequence selected from the group consisting of SEQ ID NO: 237, SEQ ID NO: 238, SEQ ID NO: 239, SEQ ID NO: 241, SEQ ID NO: 242, SEQ ID NO: 243, SEQ ID NO: 244, SEQ ID NO: 245, SEQ ID NO: 246, SEQ ID NO: 247, SEQ ID NO: 248, SEQ ID NO: 250, SEQ ID NO: 251, SEQ ID NO: 252, SEQ ID NO: 253, SEQ ID NO: 254, SEQ ID NO: 255, SEQ ID NO: 256, SEQ ID NO: 257, SEQ ID NO: 258, SEQ ID NO: 259, SEQ ID NO: 260, SEQ ID NO: 261, SEQ ID NO: 262, SEQ ID NO: 263, SEQ ID NO: 264, SEQ ID NO: 265, SEQ ID NO: 266, SEQ ID NO: 267, SEQ ID NO: 268, SEQ ID NO: 269, SEQ ID NO: 270, SEQ ID NO: 271, SEQ ID NO: 273, SEQ ID NO: 274, SEQ ID NO: 275, SEQ ID NO: 276, SEQ ID NO: 277, SEQ ID NO: 278, SEQ ID NO: 279, SEQ ID NO: 280, SEQ ID NO: 281, SEQ ID NO: 282, SEQ ID NO: 283, SEQ ID NO: 284, SEQ ID NO: 285, SEQ ID NO: 286, SEQ ID NO: 287, SEQ ID NO: 288, SEQ ID NO: 289, SEQ ID NO: 290, SEQ ID NO: 291, SEQ ID NO: 292, SEQ ID NO: 293, SEQ ID NO: 294, SEQ ID NO: 295, SEQ ID NO: 296, SEQ ID NO: 297, SEQ ID NO: 298, SEQ ID NO: 299, SEQ ID NO: 300, SEQ ID NO: 301, SEQ ID NO: 302, SEQ ID NO: 303, SEQ ID NO: 304, SEQ ID NO: 305, SEQ ID NO: 306, SEQ ID NO: 307, SEQ ID NO: 308, SEQ ID NO: 309, SEQ ID NO: 310, SEQ ID NO: 311, SEQ ID NO: 312, SEQ ID NO: 313, SEQ ID NO: 314, SEQ ID NO: 315, SEQ ID NO: 316, SEQ ID NO: 317, SEQ ID NO: 318, SEQ ID NO: 319, SEQ ID NO: 320, SEQ ID NO: 321, SEQ ID NO: 322, SEQ ID NO: 323, SEQ ID NO: 324, SEQ ID NO: 325, SEQ ID NO: 326, SEQ ID NO: 327, SEQ ID NO: 328, SEQ ID NO: 329, SEQ ID NO: 332, SEQ ID NO: 333, SEQ ID NO: 334, SEQ ID NO: 335, SEQ ID NO: 336, SEQ ID NO: 337, SEQ ID NO: 338, SEQ ID NO: 339, SEQ ID NO: 340, SEQ ID NO: 341, SEQ ID NO: 342, SEQ ID NO: 343, SEQ ID NO: 344, SEQ ID NO: 345, SEQ ID NO: 346, SEQ ID NO: 347, SEQ ID NO: 348, SEQ ID NO: 349, SEQ ID NO: 350, SEQ ID NO: 351, SEQ ID NO: 352, SEQ ID NO: 353, SEQ ID NO: 354, SEQ ID NO: 355, SEQ ID NO: 356, SEQ ID NO: 357, SEQ ID NO: 358, SEQ ID NO: 359, SEQ ID NO: 360, SEQ ID NO: 361, SEQ ID NO: 362, SEQ ID NO: 363, SEQ ID NO: 364, SEQ ID NO: 365, SEQ ID NO: 366, SEQ ID NO: 367, SEQ ID NO: 368, SEQ ID NO: 369, SEQ ID NO: 371, SEQ ID NO: 372, SEQ ID NO: 373, SEQ ID NO: 374, SEQ ID NO: 375, SEQ ID NO: 376, and SEQ ID NO: 377.
[0018] 10. The genetically altered plant or part thereof of any one of aspects 2-5b, wherein the nucleic acid encodes a NLP4 orthogroup protein, and wherein the NLP4 orthogroup protein has at least 70% sequence identity, at least 75% sequence identity, at least 80% sequence identity, at least 85% sequence identity, at least 90% sequence identity, at least 95% sequence identity, at least 96% sequence identity, at least 97% sequence identity, at least 98% sequence identity, or at least 99% sequence identity to an amino acid sequence selected from the group consisting of SEQ ID NO: 378, SEQ ID NO: 379, SEQ ID NO: 380, SEQ ID NO: 381, SEQ ID NO: 382, SEQ ID NO: 383, SEQ ID NO: 384, SEQ ID NO: 385, SEQ ID NO: 386, SEQ ID NO: 387, SEQ ID NO: 388, SEQ ID NO: 389, SEQ ID NO: 390, SEQ ID NO: 391, SEQ ID NO: 392, SEQ ID NO: 393, SEQ ID NO: 394, SEQ ID NO: 395, SEQ ID NO: 396, SEQ ID NO: 397, SEQ ID NO: 398, SEQ ID NO: 399, SEQ ID NO: 400, SEQ ID NO: 401, SEQ ID NO: 402, SEQ ID NO: 403, SEQ ID NO: 404, SEQ ID NO: 405, SEQ ID NO: 406, SEQ ID NO: 408, SEQ ID NO: 409, SEQ ID NO: 410, SEQ ID NO: 411, SEQ ID NO: 412, SEQ ID NO: 413, SEQ ID NO: 414, SEQ ID NO: 415, SEQ ID NO: 417, SEQ ID NO: 418, SEQ ID NO: 419, SEQ ID NO: 420, SEQ ID NO: 421, SEQ ID NO: 422, SEQ ID NO: 423, SEQ ID NO: 424, SEQ ID NO: 425, SEQ ID NO: 426, SEQ ID NO: 427, SEQ ID NO: 428, SEQ ID NO: 429, SEQ ID NO: 430, SEQ ID NO: 431, SEQ ID NO: 432, SEQ ID NO: 433, SEQ ID NO: 434, SEQ ID NO: 435, SEQ ID NO: 436, SEQ ID NO: 437, SEQ ID NO: 438, SEQ ID NO: 439, SEQ ID NO: 440, SEQ ID NO: 441, SEQ ID NO: 442, SEQ ID NO: 443, SEQ ID NO: 444, SEQ ID NO: 445, SEQ ID NO: 446, SEQ ID NO: 447, SEQ ID NO: 448, SEQ ID NO: 449, SEQ ID NO: 450, SEQ ID NO: 451, SEQ ID NO: 452, SEQ ID NO: 453, SEQ ID NO: 455, SEQ ID NO: 456, SEQ ID NO: 457, SEQ ID NO: 458, SEQ ID NO: 459, SEQ ID NO: 460, SEQ ID NO: 461, SEQ ID NO: 462, SEQ ID NO: 463, SEQ ID NO: 464, SEQ ID NO: 465, SEQ ID NO: 466, SEQ ID NO: 467, SEQ ID NO: 468, SEQ ID NO: 469, SEQ ID NO: 470, SEQ ID NO: 471, SEQ ID NO: 472, SEQ ID NO: 473, SEQ ID NO: 474, SEQ ID NO: 475, SEQ ID NO: 476, SEQ ID NO: 477, SEQ ID NO: 478, SEQ ID NO: 479, SEQ ID NO: 480, SEQ ID NO: 481, SEQ ID NO: 482, SEQ ID NO: 483, SEQ ID NO: 484, SEQ ID NO: 485, SEQ ID NO: 486, SEQ ID NO: 487, SEQ ID NO: 488, SEQ ID NO: 489, SEQ ID NO: 490, SEQ ID NO: 491, SEQ ID NO: 492, SEQ ID NO: 493, SEQ ID NO: 494, SEQ ID NO: 495, SEQ ID NO: 496, SEQ ID NO: 497, SEQ ID NO: 498, SEQ ID NO: 499, SEQ ID NO: 500, SEQ ID NO: 501, SEQ ID NO: 502, SEQ ID NO: 504, SEQ ID NO: 505, SEQ ID NO: 506, SEQ ID NO: 507, SEQ ID NO: 508, SEQ ID NO: 509, SEQ ID NO: 510, SEQ ID NO: 511, SEQ ID NO: 512, SEQ ID NO: 513, SEQ ID NO: 514, SEQ ID NO: 515, SEQ ID NO: 516, SEQ ID NO: 517, SEQ ID NO: 518, SEQ ID NO: 519, SEQ ID NO: 520, SEQ ID NO: 521, SEQ ID NO: 522, SEQ ID NO: 523, and SEQ ID NO: 524.
[0019] 11. The genetically altered plant or part thereof of any one of aspects 2-5b, wherein the nucleic acid encodes a basal NIN/NLP orthogroup protein, and wherein the basal NIN/NLP orthogroup protein has at least 70% sequence identity, at least 75% sequence identity, at least 80% sequence identity, at least 85% sequence identity, at least 90% sequence identity, at least 95% sequence identity, at least 96% sequence identity, at least 97% sequence identity, at least 98% sequence identity, or at least 99% sequence identity to an amino acid sequence selected from the group consisting of SEQ ID NO: 525, SEQ ID NO: 526, SEQ ID NO: 527, SEQ ID NO: 528, SEQ ID NO: 529, SEQ ID NO: 530, SEQ ID NO: 531, SEQ ID NO: 532, SEQ ID NO: 533, SEQ ID NO: 534, SEQ ID NO: 535, SEQ ID NO: 536, SEQ ID NO: 537, SEQ ID NO: 538, SEQ ID NO: 539, SEQ ID NO: 540, SEQ ID NO: 541, SEQ ID NO: 542, SEQ ID NO: 543, SEQ ID NO: 544, SEQ ID NO: 545, SEQ ID NO: 546, SEQ ID NO: 547, SEQ ID NO: 548, SEQ ID NO: 549, and SEQ ID NO: 550.
[0020] 12. The genetically altered plant or part thereof of any one of aspects 2-11, wherein the one or more AuxREs are derived from a promoter of a nucleic acid encoding the NIN protein or the NLP protein in a legume or an actinorhizal plant species or wherein the one or more AuxREs are derived from a synthetic auxin responsive promoter, optionally wherein the synthetic auxin responsive promoter is pDR5.
[0021] 13. The genetically altered plant or part thereof of any one of aspects 2-12, wherein the one or more AuxREs are heterologous or transfected.
[0022] 14. The genetically altered plant or part thereof of any one of aspects 2-12, wherein the one or more Auxin REs are endogenous.
[0023] 15. The genetically altered plant or part thereof of any one of aspects 2-14, wherein the nucleic acid encoding the NIN protein or the NLP protein is heterologous or transfected.
[0024] 16. The genetically altered plant or part thereof of any one of aspects 2-14, wherein the nucleic acid encoding the NIN protein or the NLP protein is endogenous.
[0025] 17. The genetically altered plant or part thereof of any one of aspects 1-16, wherein the genetically altered plant is a monocot, and wherein the genetically altered plant is selected from the group consisting of corn, rice, wheat, barley, sorghum, millet, oat, and rye.
[0026] 18. The genetically altered plant or part thereof of any one of aspects 1-16, wherein the genetically altered plant is selected from the group consisting of apple, pear, plum, apricot, peach, almond, walnut, cherry, strawberry, raspberry, blackberry, red currant, black currant, melon, cucumber, pumpkin, squash, grape, hemp, hops, birch, beech, jujube, cassava, poplar, chestnut, citrus, potato, tomato, sweet potato, Datisca spp., Trema spp., and Jatropha spp.
[0027] 19. The genetically altered plant or part thereof of aspect 17 or aspect 18, wherein the genetically altered plant is strawberry, barley, or Datisca spp. or the genetically altered plant is a non-nodulating plant and the increased activity of the NODULE INCEPTION (NIN) protein or the NIN-like protein (NLP protein) in response to auxin signaling induces formation of actinorhizal nodule-like structures.
[0028] 20. A method of producing the genetically altered plant or part thereof of any one of aspects 1-19, comprising introducing a genetic alteration to the plant comprising a first nucleic acid sequence comprising one or more AuxREs.
[0029] 21. The method of aspect 20, further comprising introducing a second nucleic acid sequence encoding the NIN protein or the NLP protein, wherein the first nucleic acid sequence and the second nucleic acid sequence are operably linked.
[0030] 22. The method of aspect 20, wherein the first nucleic acid sequence is inserted into the genome of the plant so that the nucleic acid sequence is operably linked to an endogenous nucleic acid sequence encoding the NIN protein or the NLP protein.
[0031] 23. The method of any one of aspects 20-22, wherein the one or more AuxREs comprise a TGTCTC motif or a TGTCTN motif.
[0032] 24. The method of any one of aspects 20-23, wherein the first nucleic acid sequence comprises a synthetic auxin responsive promoter, optionally wherein the synthetic auxin responsive promoter is pDR5.
[0033] 24b. The method of any one of aspects 21-24, wherein the NIN protein or the NLP protein comprises an amino acid sequence with at least 80%, at least 85%, at least 90%, at least 91%, at least 92%, at least 93%, at least 94%, at least 95%, at least 96%, at least 97%, at least 98%, at least 99%, or 100% identity to SEQ ID NO: 649.
[0034] 25. The method of any one of aspects 21-24b, wherein the NIN protein has at least 70% sequence identity, at least 75% sequence identity, at least 80% sequence identity, at least 85% sequence identity, at least 90% sequence identity, at least 95% sequence identity, at least 96% sequence identity, at least 97% sequence identity, at least 98% sequence identity, or at least 99% sequence identity to an amino acid sequence selected from the group consisting of SEQ ID NO: 551, SEQ ID NO: 552, SEQ ID NO: 553, SEQ ID NO: 554, SEQ ID NO: 555, SEQ ID NO: 556, SEQ ID NO: 557, SEQ ID NO: 558, SEQ ID NO: 559, SEQ ID NO: 560, SEQ ID NO: 561, SEQ ID NO: 562, SEQ ID NO: 563, SEQ ID NO: 564, SEQ ID NO: 565, SEQ ID NO: 566, SEQ ID NO: 567, SEQ ID NO: 568, SEQ ID NO: 569, SEQ ID NO: 570, SEQ ID NO: 571, SEQ ID NO: 572, SEQ ID NO: 573, SEQ ID NO: 574, SEQ ID NO: 575, SEQ ID NO: 576, SEQ ID NO: 577, SEQ ID NO: 578, SEQ ID NO: 579, SEQ ID NO: 580, SEQ ID NO: 581, SEQ ID NO: 582, SEQ ID NO: 583, SEQ ID NO: 584, SEQ ID NO: 585, SEQ ID NO: 586, SEQ ID NO: 587, and SEQ ID NO: 588; wherein the NIN/NLP1 orthogroup protein has at least 70% sequence identity, at least 75% sequence identity, at least 80% sequence identity, at least 85% sequence identity, at least 90% sequence identity, at least 95% sequence identity, at least 96% sequence identity, at least 97% sequence identity, at least 98% sequence identity, or at least 99% sequence identity to an amino acid sequence selected from the group consisting of SEQ ID NO: 1, SEQ ID NO: 2, SEQ ID NO: 3, SEQ ID NO: 4, SEQ ID NO: 5, SEQ ID NO: 6, SEQ ID NO: 8, SEQ ID NO: 9, SEQ ID NO: 10, SEQ ID NO: 11, SEQ ID NO: 12, SEQ ID NO: 13, SEQ ID NO: 14, SEQ ID NO: 15, SEQ ID NO: 16, SEQ ID NO: 17, SEQ ID NO: 18, SEQ ID NO: 19, SEQ ID NO: 20, SEQ ID NO: 21, SEQ ID NO: 22, SEQ ID NO: 23, SEQ ID NO: 24, SEQ ID NO: 25, SEQ ID NO: 26, SEQ ID NO: 27, SEQ ID NO: 28, SEQ ID NO: 29, SEQ ID NO: 30, SEQ ID NO: 31, SEQ ID NO: 32, SEQ ID NO: 33, SEQ ID NO: 34, SEQ ID NO: 35, SEQ ID NO: 36, SEQ ID NO: 37, SEQ ID NO: 38, SEQ ID NO: 39, SEQ ID NO: 40, SEQ ID NO: 41, SEQ ID NO: 42, SEQ ID NO: 43, SEQ ID NO: 44, SEQ ID NO: 45, SEQ ID NO: 46, SEQ ID NO: 47, SEQ ID NO: 48, SEQ ID NO: 49, SEQ ID NO: 50, SEQ ID NO: 51, SEQ ID NO: 52, SEQ ID NO: 53, SEQ ID NO: 54, SEQ ID NO: 55, SEQ ID NO: 56, SEQ ID NO: 57, SEQ ID NO: 58, SEQ ID NO: 59, SEQ ID NO: 60, SEQ ID NO: 61, SEQ ID NO: 62, SEQ ID NO: 63, SEQ ID NO: 64, SEQ ID NO: 65, SEQ ID NO: 66, SEQ ID NO: 67, SEQ ID NO: 68, SEQ ID NO: 69, SEQ ID NO: 70, SEQ ID NO: 71, SEQ ID NO: 72, SEQ ID NO: 73, SEQ ID NO: 74, SEQ ID NO: 75, SEQ ID NO: 76, SEQ ID NO: 77, SEQ ID NO: 79, SEQ ID NO: 80, SEQ ID NO: 81, SEQ ID NO: 82, SEQ ID NO: 83, SEQ ID NO: 84, SEQ ID NO: 85, SEQ ID NO: 86, SEQ ID NO: 87, SEQ ID NO: 88, SEQ ID NO: 89, SEQ ID NO: 90, SEQ ID NO: 91, SEQ ID NO: 92, SEQ ID NO: 93, SEQ ID NO: 94, SEQ ID NO: 95, SEQ ID NO: 96, SEQ ID NO: 98, SEQ ID NO: 99, SEQ ID NO: 100, SEQ ID NO: 101, SEQ ID NO: 102, SEQ ID NO: 103, SEQ ID NO: 104, SEQ ID NO: 105, SEQ ID NO: 106, SEQ ID NO: 108, SEQ ID NO: 109, SEQ ID NO: 131, SEQ ID NO: 132, SEQ ID NO: 133, SEQ ID NO: 134, SEQ ID NO: 135, SEQ ID NO: 136, SEQ ID NO: 137, SEQ ID NO: 138, SEQ ID NO: 139, SEQ ID NO: 140, SEQ ID NO: 141, SEQ ID NO: 142, SEQ ID NO: 143, SEQ ID NO: 144, SEQ ID NO: 145, SEQ ID NO: 146, SEQ ID NO: 147, SEQ ID NO: 148, SEQ ID NO: 149, SEQ ID NO: 150, SEQ ID NO: 151, SEQ ID NO: 152, SEQ ID NO: 153, SEQ ID NO: 154, SEQ ID NO: 155, SEQ ID NO: 156, SEQ ID NO: 157, SEQ ID NO: 158, SEQ ID NO: 159, SEQ ID NO: 160, SEQ ID NO: 161, SEQ ID NO: 162, SEQ ID NO: 163, SEQ ID NO: 164, SEQ ID NO: 165, SEQ ID NO: 166, SEQ ID NO: 167, SEQ ID NO: 168, SEQ ID NO: 169, SEQ ID NO: 170, SEQ ID NO: 171, SEQ ID NO: 172, SEQ ID NO: 173, SEQ ID NO: 174, SEQ ID NO: 175, SEQ ID NO: 177, SEQ ID NO: 178, SEQ ID NO: 179, SEQ ID NO: 180, SEQ ID NO: 181, SEQ ID NO: 182, SEQ ID NO: 183, SEQ ID NO: 184, SEQ ID NO: 185, SEQ ID NO: 186, SEQ ID NO: 187, SEQ ID NO: 188, SEQ ID NO: 189, SEQ ID NO: 190, SEQ ID NO: 191, SEQ ID NO: 192, SEQ ID NO: 193, SEQ ID NO: 194, SEQ ID NO: 196, SEQ ID NO: 197, SEQ ID NO: 198, SEQ ID NO: 199, SEQ ID NO: 200, SEQ ID NO: 201, SEQ ID NO: 202, SEQ ID NO: 203, SEQ ID NO: 204, SEQ ID NO: 205, SEQ ID NO: 206, SEQ ID NO: 207, SEQ ID NO: 208, SEQ ID NO: 209, SEQ ID NO: 210, SEQ ID NO: 211, SEQ ID NO: 212, SEQ ID NO: 213, SEQ ID NO: 214, SEQ ID NO: 215, SEQ ID NO: 216, SEQ ID NO: 217, SEQ ID NO: 218, SEQ ID NO: 219, SEQ ID NO: 220, SEQ ID NO: 221, SEQ ID NO: 222, SEQ ID NO: 223, SEQ ID NO: 224, SEQ ID NO: 225, SEQ ID NO: 226, SEQ ID NO: 227, SEQ ID NO: 228, SEQ ID NO: 229, SEQ ID NO: 230, SEQ ID NO: 231, SEQ ID NO: 232, SEQ ID NO: 233, SEQ ID NO: 234, SEQ ID NO: 235, SEQ ID NO: 236, SEQ ID NO: 551, SEQ ID NO: 552, SEQ ID NO: 553, SEQ ID NO: 554, SEQ ID NO: 555, SEQ ID NO: 556, SEQ ID NO: 557, SEQ ID NO: 558, SEQ ID NO: 559, SEQ ID NO: 560, SEQ ID NO: 561, SEQ ID NO: 562, SEQ ID NO: 563, SEQ ID NO: 564, SEQ ID NO: 565, SEQ ID NO: 566, SEQ ID NO: 567, SEQ ID NO: 568, SEQ ID NO: 569, SEQ ID NO: 570, SEQ ID NO: 571, SEQ ID NO: 572, SEQ ID NO: 573, SEQ ID NO: 574, SEQ ID NO: 575, SEQ ID NO: 576, SEQ ID NO: 577, SEQ ID NO: 578, SEQ ID NO: 579, SEQ ID NO: 580, SEQ ID NO: 581, SEQ ID NO: 582, SEQ ID NO: 583, SEQ ID NO: 584, SEQ ID NO: 585, SEQ ID NO: 586, SEQ ID NO: 587, and SEQ ID NO: 588; wherein the NLP2-3 orthogroup protein has at least 70% sequence identity, at least 75% sequence identity, at least 80% sequence identity, at least 85% sequence identity, at least 90% sequence identity, at least 95% sequence identity, at least 96% sequence identity, at least 97% sequence identity, at least 98% sequence identity, or at least 99% sequence identity to an amino acid sequence selected from the group consisting of SEQ ID NO: 237, SEQ ID NO: 238, SEQ ID NO: 239, SEQ ID NO: 241, SEQ ID NO: 242, SEQ ID NO: 243, SEQ ID NO: 244, SEQ ID NO: 245, SEQ ID NO: 246, SEQ ID NO: 247, SEQ ID NO: 248, SEQ ID NO: 250, SEQ ID NO: 251, SEQ ID NO: 252, SEQ ID NO: 253, SEQ ID NO: 254, SEQ ID NO: 255, SEQ ID NO: 256, SEQ ID NO: 257, SEQ ID NO: 258, SEQ ID NO: 259, SEQ ID NO: 260, SEQ ID NO: 261, SEQ ID NO: 262, SEQ ID NO: 263, SEQ ID NO: 264, SEQ ID NO: 265, SEQ ID NO: 266, SEQ ID NO: 267, SEQ ID NO: 268, SEQ ID NO: 269, SEQ ID NO: 270, SEQ ID NO: 271, SEQ ID NO: 273, SEQ ID NO: 274, SEQ ID NO: 275, SEQ ID NO: 276, SEQ ID NO: 277, SEQ ID NO: 278, SEQ ID NO: 279, SEQ ID NO: 280, SEQ ID NO: 281, SEQ ID NO: 282, SEQ ID NO: 283, SEQ ID NO: 284, SEQ ID NO: 285, SEQ ID NO: 286, SEQ ID NO: 287, SEQ ID NO: 288, SEQ ID NO: 289, SEQ ID NO: 290, SEQ ID NO: 291, SEQ ID NO: 292, SEQ ID NO: 293, SEQ ID NO: 294, SEQ ID NO: 295, SEQ ID NO: 296, SEQ ID NO: 297, SEQ ID NO: 298, SEQ ID NO: 299, SEQ ID NO: 300, SEQ ID NO: 301, SEQ ID NO: 302, SEQ ID NO: 303, SEQ ID NO: 304, SEQ ID NO: 305, SEQ ID NO: 306, SEQ ID NO: 307, SEQ ID NO: 308, SEQ ID NO: 309, SEQ ID NO: 310, SEQ ID NO: 311, SEQ ID NO: 312, SEQ ID NO: 313, SEQ ID NO: 314, SEQ ID NO: 315, SEQ ID NO: 316, SEQ ID NO: 317, SEQ ID NO: 318, SEQ ID NO: 319, SEQ ID NO: 320, SEQ ID NO: 321, SEQ ID NO: 322, SEQ ID NO: 323, SEQ ID NO: 324, SEQ ID NO: 325, SEQ ID NO: 326, SEQ ID NO: 327, SEQ ID NO: 328, SEQ ID NO: 329, SEQ ID NO: 332, SEQ ID NO: 333, SEQ ID NO: 334, SEQ ID NO: 335, SEQ ID NO: 336, SEQ ID NO: 337, SEQ ID NO: 338, SEQ ID NO: 339, SEQ ID NO: 340, SEQ ID NO: 341, SEQ ID NO: 342, SEQ ID NO: 343, SEQ ID NO: 344, SEQ ID NO: 345, SEQ ID NO: 346, SEQ ID NO: 347, SEQ ID NO: 348, SEQ ID NO: 349, SEQ ID NO: 350, SEQ ID NO: 351, SEQ ID NO: 352, SEQ ID NO: 353, SEQ ID NO: 354, SEQ ID NO: 355, SEQ ID NO: 356, SEQ ID NO: 357, SEQ ID NO: 358, SEQ ID NO: 359, SEQ ID NO: 360, SEQ ID NO: 361, SEQ ID NO: 362, SEQ ID NO: 363, SEQ ID NO: 364, SEQ ID NO: 365, SEQ ID NO: 366, SEQ ID NO: 367, SEQ ID NO: 368, SEQ ID NO: 369, SEQ ID NO: 371, SEQ ID NO: 372, SEQ ID NO: 373, SEQ ID NO: 374, SEQ ID NO: 375, SEQ ID NO: 376, and SEQ ID NO: 377; wherein the NLP4 orthogroup protein has at least 70% sequence identity, at least 75% sequence identity, at least 80% sequence identity, at least 85% sequence identity, at least 90% sequence identity, at least 95% sequence identity, at least 96% sequence identity, at least 97% sequence identity, at least 98% sequence identity, or at least 99% sequence identity to an amino acid sequence selected from the group consisting of SEQ ID NO: 378, SEQ ID NO: 379, SEQ ID NO: 380, SEQ ID NO: 381, SEQ ID NO: 382, SEQ ID NO: 383, SEQ ID NO: 384, SEQ ID NO: 385, SEQ ID NO: 386, SEQ ID NO: 387, SEQ ID NO: 388, SEQ ID NO: 389, SEQ ID NO: 390, SEQ ID NO: 391, SEQ ID NO: 392, SEQ ID NO: 393, SEQ ID NO: 394, SEQ ID NO: 395, SEQ ID NO: 396, SEQ ID NO: 397, SEQ ID NO: 398, SEQ ID NO: 399, SEQ ID NO: 400, SEQ ID NO: 401, SEQ ID NO: 402, SEQ ID NO: 403, SEQ ID NO: 404, SEQ ID NO: 405, SEQ ID NO: 406, SEQ ID NO: 408, SEQ ID NO: 409, SEQ ID NO: 410, SEQ ID NO: 411, SEQ ID NO: 412, SEQ ID NO: 413, SEQ ID NO: 414, SEQ ID NO: 415, SEQ ID NO: 417, SEQ ID NO: 418, SEQ ID NO: 419, SEQ ID NO: 420, SEQ ID NO: 421, SEQ ID NO: 422, SEQ ID NO: 423, SEQ ID NO: 424, SEQ ID NO: 425, SEQ ID NO: 426, SEQ ID NO: 427, SEQ ID NO: 428, SEQ ID NO: 429, SEQ ID NO: 430, SEQ ID NO: 431, SEQ ID NO: 432, SEQ ID NO: 433, SEQ ID NO: 434, SEQ ID NO: 435, SEQ ID NO: 436, SEQ ID NO: 437, SEQ ID NO: 438, SEQ ID NO: 439, SEQ ID NO: 440, SEQ ID NO: 441, SEQ ID NO: 442, SEQ ID NO: 443, SEQ ID NO: 444, SEQ ID NO: 445, SEQ ID NO: 446, SEQ ID NO: 447, SEQ ID NO: 448, SEQ ID NO: 449, SEQ ID NO: 450, SEQ ID NO: 451, SEQ ID NO: 452, SEQ ID NO: 453, SEQ ID NO: 455, SEQ ID NO: 456, SEQ ID NO: 457, SEQ ID NO: 458, SEQ ID NO: 459, SEQ ID NO: 460, SEQ ID NO: 461, SEQ ID NO: 462, SEQ ID NO: 463, SEQ ID NO: 464, SEQ ID NO: 465, SEQ ID NO: 466, SEQ ID NO: 467, SEQ ID NO: 468, SEQ ID NO: 469, SEQ ID NO: 470, SEQ ID NO: 471, SEQ ID NO: 472, SEQ ID NO: 473, SEQ ID NO: 474, SEQ ID NO: 475, SEQ ID NO: 476, SEQ ID NO: 477, SEQ ID NO: 478, SEQ ID NO: 479, SEQ ID NO: 480, SEQ ID NO: 481, SEQ ID NO: 482, SEQ ID NO: 483, SEQ ID NO: 484, SEQ ID NO: 485, SEQ ID NO: 486, SEQ ID NO: 487, SEQ ID NO: 488, SEQ ID NO: 489, SEQ ID NO: 490, SEQ ID NO: 491, SEQ ID NO: 492, SEQ ID NO: 493, SEQ ID NO: 494, SEQ ID NO: 495, SEQ ID NO: 496, SEQ ID NO: 497, SEQ ID NO: 498, SEQ ID NO: 499, SEQ ID NO: 500, SEQ ID NO: 501, SEQ ID NO: 502, SEQ ID NO: 504, SEQ ID NO: 505, SEQ ID NO: 506, SEQ ID NO: 507, SEQ ID NO: 508, SEQ ID NO: 509, SEQ ID NO: 510, SEQ ID NO: 511, SEQ ID NO: 512, SEQ ID NO: 513, SEQ ID NO: 514, SEQ ID NO: 515, SEQ ID NO: 516, SEQ ID NO: 517, SEQ ID NO: 518, SEQ ID NO: 519, SEQ ID NO: 520, SEQ ID NO: 521, SEQ ID NO: 522, SEQ ID NO: 523, and SEQ ID NO: 524; or wherein the basal NIN/NLP orthogroup protein has at least 70% sequence identity, at least 75% sequence identity, at least 80% sequence identity, at least 85% sequence identity, at least 90% sequence identity, at least 95% sequence identity, at least 96% sequence identity, at least 97% sequence identity, at least 98% sequence identity, or at least 99% sequence identity to an amino acid sequence selected from the group consisting of SEQ ID NO: 525, SEQ ID NO: 526, SEQ ID NO: 527, SEQ ID NO: 528, SEQ ID NO: 529, SEQ ID NO: 530, SEQ ID NO: 531, SEQ ID NO: 532, SEQ ID NO: 533, SEQ ID NO: 534, SEQ ID NO: 535, SEQ ID NO: 536, SEQ ID NO: 537, SEQ ID NO: 538, SEQ ID NO: 539, SEQ ID NO: 540, SEQ ID NO: 541, SEQ ID NO: 542, SEQ ID NO: 543, SEQ ID NO: 544, SEQ ID NO: 545, SEQ ID NO: 546, SEQ ID NO: 547, SEQ ID NO: 548, SEQ ID NO: 549, and SEQ ID NO: 550.
[0035] 26. A method of producing the genetically altered plant or part thereof of any one of aspects 1-19, comprising genetically modifying the plant or part thereof by transforming the plant or part thereof with one or more gene editing components that target an endogenous nuclear genome sequence between a cyclops binding site and a transcriptional start site of the nucleic acid encoding the NIN protein or the NLP protein and introduce one or more AuxREs.
[0036] 27. The method of aspect 26, wherein the one or more gene editing components comprise a ribonucleoprotein complex that targets the nuclear genome sequence; a vector comprising a TALEN protein encoding sequence, wherein the TALEN protein targets the nuclear genome sequence; a vector comprising a ZFN protein encoding sequence, wherein the ZFN protein targets the nuclear genome sequence; an oligonucleotide donor (OND), wherein the OND targets the nuclear genome sequence; or a vector CRISPR/Cas enzyme encoding sequence and a targeting sequence, wherein the targeting sequence targets the nuclear genome sequence.
[0037] 28. The method of aspect 26 or aspect 27, wherein the one or more AuxREs comprise a TGTCTC motif or a TGTCTN motif.
[0038] 28b. The method of any one of aspects 26-28, wherein the NIN protein or the NLP protein comprises an amino acid sequence with at least 80%, at least 85%, at least 90%, at least 91%, at least 92%, at least 93%, at least 94%, at least 95%, at least 96%, at least 97%, at least 98%, at least 99%, or 100% identity to SEQ ID NO: 649.
[0039] 29. The method of any one of aspects 26-28b, wherein the NIN protein has at least 70% sequence identity, at least 75% sequence identity, at least 80% sequence identity, at least 85% sequence identity, at least 90% sequence identity, at least 95% sequence identity, at least 96% sequence identity, at least 97% sequence identity, at least 98% sequence identity, or at least 99% sequence identity to an amino acid sequence selected from the group consisting of SEQ ID NO: 551, SEQ ID NO: 552, SEQ ID NO: 553, SEQ ID NO: 554, SEQ ID NO: 555, SEQ ID NO: 556, SEQ ID NO: 557, SEQ ID NO: 558, SEQ ID NO: 559, SEQ ID NO: 560, SEQ ID NO: 561, SEQ ID NO: 562, SEQ ID NO: 563, SEQ ID NO: 564, SEQ ID NO: 565, SEQ ID NO: 566, SEQ ID NO: 567, SEQ ID NO: 568, SEQ ID NO: 569, SEQ ID NO: 570, SEQ ID NO: 571, SEQ ID NO: 572, SEQ ID NO: 573, SEQ ID NO: 574, SEQ ID NO: 575, SEQ ID NO: 576, SEQ ID NO: 577, SEQ ID NO: 578, SEQ ID NO: 579, SEQ ID NO: 580, SEQ ID NO: 581, SEQ ID NO: 582, SEQ ID NO: 583, SEQ ID NO: 584, SEQ ID NO: 585, SEQ ID NO: 586, SEQ ID NO: 587, and SEQ ID NO: 588; wherein the NIN/NLP1 orthogroup protein has at least 70% sequence identity, at least 75% sequence identity, at least 80% sequence identity, at least 85% sequence identity, at least 90% sequence identity, at least 95% sequence identity, at least 96% sequence identity, at least 97% sequence identity, at least 98% sequence identity, or at least 99% sequence identity to an amino acid sequence selected from the group consisting of SEQ ID NO: 1, SEQ ID NO: 2, SEQ ID NO: 3, SEQ ID NO: 4, SEQ ID NO: 5, SEQ ID NO: 6, SEQ ID NO: 8, SEQ ID NO: 9, SEQ ID NO: 10, SEQ ID NO: 11, SEQ ID NO: 12, SEQ ID NO: 13, SEQ ID NO: 14, SEQ ID NO: 15, SEQ ID NO: 16, SEQ ID NO: 17, SEQ ID NO: 18, SEQ ID NO: 19, SEQ ID NO: 20, SEQ ID NO: 21, SEQ ID NO: 22, SEQ ID NO: 23, SEQ ID NO: 24, SEQ ID NO: 25, SEQ ID NO: 26, SEQ ID NO: 27, SEQ ID NO: 28, SEQ ID NO: 29, SEQ ID NO: 30, SEQ ID NO: 31, SEQ ID NO: 32, SEQ ID NO: 33, SEQ ID NO: 34, SEQ ID NO: 35, SEQ ID NO: 36, SEQ ID NO: 37, SEQ ID NO: 38, SEQ ID NO: 39, SEQ ID NO: 40, SEQ ID NO: 41, SEQ ID NO: 42, SEQ ID NO: 43, SEQ ID NO: 44, SEQ ID NO: 45, SEQ ID NO: 46, SEQ ID NO: 47, SEQ ID NO: 48, SEQ ID NO: 49, SEQ ID NO: 50, SEQ ID NO: 51, SEQ ID NO: 52, SEQ ID NO: 53, SEQ ID NO: 54, SEQ ID NO: 55, SEQ ID NO: 56, SEQ ID NO: 57, SEQ ID NO: 58, SEQ ID NO: 59, SEQ ID NO: 60, SEQ ID NO: 61, SEQ ID NO: 62, SEQ ID NO: 63, SEQ ID NO: 64, SEQ ID NO: 65, SEQ ID NO: 66, SEQ ID NO: 67, SEQ ID NO: 68, SEQ ID NO: 69, SEQ ID NO: 70, SEQ ID NO: 71, SEQ ID NO: 72, SEQ ID NO: 73, SEQ ID NO: 74, SEQ ID NO: 75, SEQ ID NO: 76, SEQ ID NO: 77, SEQ ID NO: 79, SEQ ID NO: 80, SEQ ID NO: 81, SEQ ID NO: 82, SEQ ID NO: 83, SEQ ID NO: 84, SEQ ID NO: 85, SEQ ID NO: 86, SEQ ID NO: 87, SEQ ID NO: 88, SEQ ID NO: 89, SEQ ID NO: 90, SEQ ID NO: 91, SEQ ID NO: 92, SEQ ID NO: 93, SEQ ID NO: 94, SEQ ID NO: 95, SEQ ID NO: 96, SEQ ID NO: 98, SEQ ID NO: 99, SEQ ID NO: 100, SEQ ID NO: 101, SEQ ID NO: 102, SEQ ID NO: 103, SEQ ID NO: 104, SEQ ID NO: 105, SEQ ID NO: 106, SEQ ID NO: 108, SEQ ID NO: 109, SEQ ID NO: 131, SEQ ID NO: 132, SEQ ID NO: 133, SEQ ID NO: 134, SEQ ID NO: 135, SEQ ID NO: 136, SEQ ID NO: 137, SEQ ID NO: 138, SEQ ID NO: 139, SEQ ID NO: 140, SEQ ID NO: 141, SEQ ID NO: 142, SEQ ID NO: 143, SEQ ID NO: 144, SEQ ID NO: 145, SEQ ID NO: 146, SEQ ID NO: 147, SEQ ID NO: 148, SEQ ID NO: 149, SEQ ID NO: 150, SEQ ID NO: 151, SEQ ID NO: 152, SEQ ID NO: 153, SEQ ID NO: 154, SEQ ID NO: 155, SEQ ID NO: 156, SEQ ID NO: 157, SEQ ID NO: 158, SEQ ID NO: 159, SEQ ID NO: 160, SEQ ID NO: 161, SEQ ID NO: 162, SEQ ID NO: 163, SEQ ID NO: 164, SEQ ID NO: 165, SEQ ID NO: 166, SEQ ID NO: 167, SEQ ID NO: 168, SEQ ID NO: 169, SEQ ID NO: 170, SEQ ID NO: 171, SEQ ID NO: 172, SEQ ID NO: 173, SEQ ID NO: 174, SEQ ID NO: 175, SEQ ID NO: 177, SEQ ID NO: 178, SEQ ID NO: 179, SEQ ID NO: 180, SEQ ID NO: 181, SEQ ID NO: 182, SEQ ID NO: 183, SEQ ID NO: 184, SEQ ID NO: 185, SEQ ID NO: 186, SEQ ID NO: 187, SEQ ID NO: 188, SEQ ID NO: 189, SEQ ID NO: 190, SEQ ID NO: 191, SEQ ID NO: 192, SEQ ID NO: 193, SEQ ID NO: 194, SEQ ID NO: 196, SEQ ID NO: 197, SEQ ID NO: 198, SEQ ID NO: 199, SEQ ID NO: 200, SEQ ID NO: 201, SEQ ID NO: 202, SEQ ID NO: 203, SEQ ID NO: 204, SEQ ID NO: 205, SEQ ID NO: 206, SEQ ID NO: 207, SEQ ID NO: 208, SEQ ID NO: 209, SEQ ID NO: 210, SEQ ID NO: 211, SEQ ID NO: 212, SEQ ID NO: 213, SEQ ID NO: 214, SEQ ID NO: 215, SEQ ID NO: 216, SEQ ID NO: 217, SEQ ID NO: 218, SEQ ID NO: 219, SEQ ID NO: 220, SEQ ID NO: 221, SEQ ID NO: 222, SEQ ID NO: 223, SEQ ID NO: 224, SEQ ID NO: 225, SEQ ID NO: 226, SEQ ID NO: 227, SEQ ID NO: 228, SEQ ID NO: 229, SEQ ID NO: 230, SEQ ID NO: 231, SEQ ID NO: 232, SEQ ID NO: 233, SEQ ID NO: 234, SEQ ID NO: 235, SEQ ID NO: 236, SEQ ID NO: 551, SEQ ID NO: 552, SEQ ID NO: 553, SEQ ID NO: 554, SEQ ID NO: 555, SEQ ID NO: 556, SEQ ID NO: 557, SEQ ID NO: 558, SEQ ID NO: 559, SEQ ID NO: 560, SEQ ID NO: 561, SEQ ID NO: 562, SEQ ID NO: 563, SEQ ID NO: 564, SEQ ID NO: 565, SEQ ID NO: 566, SEQ ID NO: 567, SEQ ID NO: 568, SEQ ID NO: 569, SEQ ID NO: 570, SEQ ID NO: 571, SEQ ID NO: 572, SEQ ID NO: 573, SEQ ID NO: 574, SEQ ID NO: 575, SEQ ID NO: 576, SEQ ID NO: 577, SEQ ID NO: 578, SEQ ID NO: 579, SEQ ID NO: 580, SEQ ID NO: 581, SEQ ID NO: 582, SEQ ID NO: 583, SEQ ID NO: 584, SEQ ID NO: 585, SEQ ID NO: 586, SEQ ID NO: 587, and SEQ ID NO: 588; wherein the NLP2-3 orthogroup protein has at least 70% sequence identity, at least 75% sequence identity, at least 80% sequence identity, at least 85% sequence identity, at least 90% sequence identity, at least 95% sequence identity, at least 96% sequence identity, at least 97% sequence identity, at least 98% sequence identity, or at least 99% sequence identity to an amino acid sequence selected from the group consisting of SEQ ID NO: 237, SEQ ID NO: 238, SEQ ID NO: 239, SEQ ID NO: 241, SEQ ID NO: 242, SEQ ID NO: 243, SEQ ID NO: 244, SEQ ID NO: 245, SEQ ID NO: 246, SEQ ID NO: 247, SEQ ID NO: 248, SEQ ID NO: 250, SEQ ID NO: 251, SEQ ID NO: 252, SEQ ID NO: 253, SEQ ID NO: 254, SEQ ID NO: 255, SEQ ID NO: 256, SEQ ID NO: 257, SEQ ID NO: 258, SEQ ID NO: 259, SEQ ID NO: 260, SEQ ID NO: 261, SEQ ID NO: 262, SEQ ID NO: 263, SEQ ID NO: 264, SEQ ID NO: 265, SEQ ID NO: 266, SEQ ID NO: 267, SEQ ID NO: 268, SEQ ID NO: 269, SEQ ID NO: 270, SEQ ID NO: 271, SEQ ID NO: 273, SEQ ID NO: 274, SEQ ID NO: 275, SEQ ID NO: 276, SEQ ID NO: 277, SEQ ID NO: 278, SEQ ID NO: 279, SEQ ID NO: 280, SEQ ID NO: 281, SEQ ID NO: 282, SEQ ID NO: 283, SEQ ID NO: 284, SEQ ID NO: 285, SEQ ID NO: 286, SEQ ID NO: 287, SEQ ID NO: 288, SEQ ID NO: 289, SEQ ID NO: 290, SEQ ID NO: 291, SEQ ID NO: 292, SEQ ID NO: 293, SEQ ID NO: 294, SEQ ID NO: 295, SEQ ID NO: 296, SEQ ID NO: 297, SEQ ID NO: 298, SEQ ID NO: 299, SEQ ID NO: 300, SEQ ID NO: 301, SEQ ID NO: 302, SEQ ID NO: 303, SEQ ID NO: 304, SEQ ID NO: 305, SEQ ID NO: 306, SEQ ID NO: 307, SEQ ID NO: 308, SEQ ID NO: 309, SEQ ID NO: 310, SEQ ID NO: 311, SEQ ID NO: 312, SEQ ID NO: 313, SEQ ID NO: 314, SEQ ID NO: 315, SEQ ID NO: 316, SEQ ID NO: 317, SEQ ID NO: 318, SEQ ID NO: 319, SEQ ID NO: 320, SEQ ID NO: 321, SEQ ID NO: 322, SEQ ID NO: 323, SEQ ID NO: 324, SEQ ID NO: 325, SEQ ID NO: 326, SEQ ID NO: 327, SEQ ID NO: 328, SEQ ID NO: 329, SEQ ID NO: 332, SEQ ID NO: 333, SEQ ID NO: 334, SEQ ID NO: 335, SEQ ID NO: 336, SEQ ID NO: 337, SEQ ID NO: 338, SEQ ID NO: 339, SEQ ID NO: 340, SEQ ID NO: 341, SEQ ID NO: 342, SEQ ID NO: 343, SEQ ID NO: 344, SEQ ID NO: 345, SEQ ID NO: 346, SEQ ID NO: 347, SEQ ID NO: 348, SEQ ID NO: 349, SEQ ID NO: 350, SEQ ID NO: 351, SEQ ID NO: 352, SEQ ID NO: 353, SEQ ID NO: 354, SEQ ID NO: 355, SEQ ID NO: 356, SEQ ID NO: 357, SEQ ID NO: 358, SEQ ID NO: 359, SEQ ID NO: 360, SEQ ID NO: 361, SEQ ID NO: 362, SEQ ID NO: 363, SEQ ID NO: 364, SEQ ID NO: 365, SEQ ID NO: 366, SEQ ID NO: 367, SEQ ID NO: 368, SEQ ID NO: 369, SEQ ID NO: 371, SEQ ID NO: 372, SEQ ID NO: 373, SEQ ID NO: 374, SEQ ID NO: 375, SEQ ID NO: 376, and SEQ ID NO: 377; wherein the NLP4 orthogroup protein has at least 70% sequence identity, at least 75% sequence identity, at least 80% sequence identity, at least 85% sequence identity, at least 90% sequence identity, at least 95% sequence identity, at least 96% sequence identity, at least 97% sequence identity, at least 98% sequence identity, or at least 99% sequence identity to an amino acid sequence selected from the group consisting of SEQ ID NO: 378, SEQ ID NO: 379, SEQ ID NO: 380, SEQ ID NO: 381, SEQ ID NO: 382, SEQ ID NO: 383, SEQ ID NO: 384, SEQ ID NO: 385, SEQ ID NO: 386, SEQ ID NO: 387, SEQ ID NO: 388, SEQ ID NO: 389, SEQ ID NO: 390, SEQ ID NO: 391, SEQ ID NO: 392, SEQ ID NO: 393, SEQ ID NO: 394, SEQ ID NO: 395, SEQ ID NO: 396, SEQ ID NO: 397, SEQ ID NO: 398, SEQ ID NO: 399, SEQ ID NO: 400, SEQ ID NO: 401, SEQ ID NO: 402, SEQ ID NO: 403, SEQ ID NO: 404, SEQ ID NO: 405, SEQ ID NO: 406, SEQ ID NO: 408, SEQ ID NO: 409, SEQ ID NO: 410, SEQ ID NO: 411, SEQ ID NO: 412, SEQ ID NO: 413, SEQ ID NO: 414, SEQ ID NO: 415, SEQ ID NO: 417, SEQ ID NO: 418, SEQ ID NO: 419, SEQ ID NO: 420, SEQ ID NO: 421, SEQ ID NO: 422, SEQ ID NO: 423, SEQ ID NO: 424, SEQ ID NO: 425, SEQ ID NO: 426, SEQ ID NO: 427, SEQ ID NO: 428, SEQ ID NO: 429, SEQ ID NO: 430, SEQ ID NO: 431, SEQ ID NO: 432, SEQ ID NO: 433, SEQ ID NO: 434, SEQ ID NO: 435, SEQ ID NO: 436, SEQ ID NO: 437, SEQ ID NO: 438, SEQ ID NO: 439, SEQ ID NO: 440, SEQ ID NO: 441, SEQ ID NO: 442, SEQ ID NO: 443, SEQ ID NO: 444, SEQ ID NO: 445, SEQ ID NO: 446, SEQ ID NO: 447, SEQ ID NO: 448, SEQ ID NO: 449, SEQ ID NO: 450, SEQ ID NO: 451, SEQ ID NO: 452, SEQ ID NO: 453, SEQ ID NO: 455, SEQ ID NO: 456, SEQ ID NO: 457, SEQ ID NO: 458, SEQ ID NO: 459, SEQ ID NO: 460, SEQ ID NO: 461, SEQ ID NO: 462, SEQ ID NO: 463, SEQ ID NO: 464, SEQ ID NO: 465, SEQ ID NO: 466, SEQ ID NO: 467, SEQ ID NO: 468, SEQ ID NO: 469, SEQ ID NO: 470, SEQ ID NO: 471, SEQ ID NO: 472, SEQ ID NO: 473, SEQ ID NO: 474, SEQ ID NO: 475, SEQ ID NO: 476, SEQ ID NO: 477, SEQ ID NO: 478, SEQ ID NO: 479, SEQ ID NO: 480, SEQ ID NO: 481, SEQ ID NO: 482, SEQ ID NO: 483, SEQ ID NO: 484, SEQ ID NO: 485, SEQ ID NO: 486, SEQ ID NO: 487, SEQ ID NO: 488, SEQ ID NO: 489, SEQ ID NO: 490, SEQ ID NO: 491, SEQ ID NO: 492, SEQ ID NO: 493, SEQ ID NO: 494, SEQ ID NO: 495, SEQ ID NO: 496, SEQ ID NO: 497, SEQ ID NO: 498, SEQ ID NO: 499, SEQ ID NO: 500, SEQ ID NO: 501, SEQ ID NO: 502, SEQ ID NO: 504, SEQ ID NO: 505, SEQ ID NO: 506, SEQ ID NO: 507, SEQ ID NO: 508, SEQ ID NO: 509, SEQ ID NO: 510, SEQ ID NO: 511, SEQ ID NO: 512, SEQ ID NO: 513, SEQ ID NO: 514, SEQ ID NO: 515, SEQ ID NO: 516, SEQ ID NO: 517, SEQ ID NO: 518, SEQ ID NO: 519, SEQ ID NO: 520, SEQ ID NO: 521, SEQ ID NO: 522, SEQ ID NO: 523, and SEQ ID NO: 524; or wherein the basal NIN/NLP orthogroup protein has at least 70% sequence identity, at least 75% sequence identity, at least 80% sequence identity, at least 85% sequence identity, at least 90% sequence identity, at least 95% sequence identity, at least 96% sequence identity, at least 97% sequence identity, at least 98% sequence identity, or at least 99% sequence identity to an amino acid sequence selected from the group consisting of SEQ ID NO: 525, SEQ ID NO: 526, SEQ ID NO: 527, SEQ ID NO: 528, SEQ ID NO: 529, SEQ ID NO: 530, SEQ ID NO: 531, SEQ ID NO: 532, SEQ ID NO: 533, SEQ ID NO: 534, SEQ ID NO: 535, SEQ ID NO: 536, SEQ ID NO: 537, SEQ ID NO: 538, SEQ ID NO: 539, SEQ ID NO: 540, SEQ ID NO: 541, SEQ ID NO: 542, SEQ ID NO: 543, SEQ ID NO: 544, SEQ ID NO: 545, SEQ ID NO: 546, SEQ ID NO: 547, SEQ ID NO: 548, SEQ ID NO: 549, and SEQ ID NO: 550.
[0040] 30. An expression vector, isolated DNA molecule, or recombinant nucleic acid comprising a nucleic acid sequence comprising one or more, two or more, three or more, four or more, five or more, six or more, seven or more, eight or more, nine or more, ten or more, eleven or more, twelve or more, thirteen or more, fourteen or more, fifteen or more, sixteen or more, seventeen or more, eighteen or more, nineteen or more, twenty or more, twenty-one or more, twenty-two or more, twenty-three or more, or twenty-four or more AuxREs from an endogenous plant promoter, or a synthetic promoter comprising one or more, two or more, three or more, four or more, six or more, seven or more, eight or more, nine or more, ten or more, eleven or more, twelve or more, thirteen or more, fourteen or more, fifteen or more, sixteen or more, seventeen or more, eighteen or more, nineteen or more, twenty or more, twenty-one or more, twenty-two or more, twenty-three or more, or twenty-four or more AuxREs.
[0041] 31. An expression vector, isolated DNA molecule, or recombinant nucleic acid comprising a nucleic acid sequence comprising one or more, two or more, three or more, four or more, five or more, six or more, seven or more, eight or more, nine or more, ten or more, eleven or more, twelve or more, thirteen or more, fourteen or more, fifteen or more, sixteen or more, seventeen or more, eighteen or more, nineteen or more, twenty or more, twenty-one or more, twenty-two or more, twenty-three or more, or twenty-four or more AuxREs operably linked to a second nucleic acid sequence encoding a NIN protein or a NLP protein.
[0042] 32. The expression vector, isolated DNA molecule, or recombinant nucleic acid of aspect 30 or aspect 31, wherein the one or more AuxREs comprise a TGTCTC motif or a TGTCTN motif.
[0043] 32b. The expression vector, isolated DNA molecule, or recombinant acid of aspect 31 or aspect 32, wherein the NIN protein or the NLP protein comprises an amino acid sequence with at least 80%, at least 85%, at least 90%, at least 91%, at least 92%, at least 93%, at least 94%, at least 95%, at least 96%, at least 97%, at least 98%, at least 99%, or 100% identity to SEQ ID NO: 649.
[0044] 33. The expression vector, isolated DNA molecule, or recombinant nucleic acid of any one of aspects 31-32b, wherein the NIN protein has at least 70% sequence identity, at least 75% sequence identity, at least 80% sequence identity, at least 85% sequence identity, at least 90% sequence identity, at least 95% sequence identity, at least 96% sequence identity, at least 97% sequence identity, at least 98% sequence identity, or at least 99% sequence identity to an amino acid sequence selected from the group consisting of SEQ ID NO: 551, SEQ ID NO: 552, SEQ ID NO: 553, SEQ ID NO: 554, SEQ ID NO: 555, SEQ ID NO: 556, SEQ ID NO: 557, SEQ ID NO: 558, SEQ ID NO: 559, SEQ ID NO: 560, SEQ ID NO: 561, SEQ ID NO: 562, SEQ ID NO: 563, SEQ ID NO: 564, SEQ ID NO: 565, SEQ ID NO: 566, SEQ ID NO: 567, SEQ ID NO: 568, SEQ ID NO: 569, SEQ ID NO: 570, SEQ ID NO: 571, SEQ ID NO: 572, SEQ ID NO: 573, SEQ ID NO: 574, SEQ ID NO: 575, SEQ ID NO: 576, SEQ ID NO: 577, SEQ ID NO: 578, SEQ ID NO: 579, SEQ ID NO: 580, SEQ ID NO: 581, SEQ ID NO: 582, SEQ ID NO: 583, SEQ ID NO: 584, SEQ ID NO: 585, SEQ ID NO: 586, SEQ ID NO: 587, and SEQ ID NO: 588; wherein the NIN/NLP1 orthogroup protein has at least 70% sequence identity, at least 75% sequence identity, at least 80% sequence identity, at least 85% sequence identity, at least 90% sequence identity, at least 95% sequence identity, at least 96% sequence identity, at least 97% sequence identity, at least 98% sequence identity, or at least 99% sequence identity to an amino acid sequence selected from the group consisting of SEQ ID NO: 1, SEQ ID NO: 2, SEQ ID NO: 3, SEQ ID NO: 4, SEQ ID NO: 5, SEQ ID NO: 6, SEQ ID NO: 8, SEQ ID NO: 9, SEQ ID NO: 10, SEQ ID NO: 11, SEQ ID NO: 12, SEQ ID NO: 13, SEQ ID NO: 14, SEQ ID NO: 15, SEQ ID NO: 16, SEQ ID NO: 17, SEQ ID NO: 18, SEQ ID NO: 19, SEQ ID NO: 20, SEQ ID NO: 21, SEQ ID NO: 22, SEQ ID NO: 23, SEQ ID NO: 24, SEQ ID NO: 25, SEQ ID NO: 26, SEQ ID NO: 27, SEQ ID NO: 28, SEQ ID NO: 29, SEQ ID NO: 30, SEQ ID NO: 31, SEQ ID NO: 32, SEQ ID NO: 33, SEQ ID NO: 34, SEQ ID NO: 35, SEQ ID NO: 36, SEQ ID NO: 37, SEQ ID NO: 38, SEQ ID NO: 39, SEQ ID NO: 40, SEQ ID NO: 41, SEQ ID NO: 42, SEQ ID NO: 43, SEQ ID NO: 44, SEQ ID NO: 45, SEQ ID NO: 46, SEQ ID NO: 47, SEQ ID NO: 48, SEQ ID NO: 49, SEQ ID NO: 50, SEQ ID NO: 51, SEQ ID NO: 52, SEQ ID NO: 53, SEQ ID NO: 54, SEQ ID NO: 55, SEQ ID NO: 56, SEQ ID NO: 57, SEQ ID NO: 58, SEQ ID NO: 59, SEQ ID NO: 60, SEQ ID NO: 61, SEQ ID NO: 62, SEQ ID NO: 63, SEQ ID NO: 64, SEQ ID NO: 65, SEQ ID NO: 66, SEQ ID NO: 67, SEQ ID NO: 68, SEQ ID NO: 69, SEQ ID NO: 70, SEQ ID NO: 71, SEQ ID NO: 72, SEQ ID NO: 73, SEQ ID NO: 74, SEQ ID NO: 75, SEQ ID NO: 76, SEQ ID NO: 77, SEQ ID NO: 79, SEQ ID NO: 80, SEQ ID NO: 81, SEQ ID NO: 82, SEQ ID NO: 83, SEQ ID NO: 84, SEQ ID NO: 85, SEQ ID NO: 86, SEQ ID NO: 87, SEQ ID NO: 88, SEQ ID NO: 89, SEQ ID NO: 90, SEQ ID NO: 91, SEQ ID NO: 92, SEQ ID NO: 93, SEQ ID NO: 94, SEQ ID NO: 95, SEQ ID NO: 96, SEQ ID NO: 98, SEQ ID NO: 99, SEQ ID NO: 100, SEQ ID NO: 101, SEQ ID NO: 102, SEQ ID NO: 103, SEQ ID NO: 104, SEQ ID NO: 105, SEQ ID NO: 106, SEQ ID NO: 108, SEQ ID NO: 109, SEQ ID NO: 131, SEQ ID NO: 132, SEQ ID NO: 133, SEQ ID NO: 134, SEQ ID NO: 135, SEQ ID NO: 136, SEQ ID NO: 137, SEQ ID NO: 138, SEQ ID NO: 139, SEQ ID NO: 140, SEQ ID NO: 141, SEQ ID NO: 142, SEQ ID NO: 143, SEQ ID NO: 144, SEQ ID NO: 145, SEQ ID NO: 146, SEQ ID NO: 147, SEQ ID NO: 148, SEQ ID NO: 149, SEQ ID NO: 150, SEQ ID NO: 151, SEQ ID NO: 152, SEQ ID NO: 153, SEQ ID NO: 154, SEQ ID NO: 155, SEQ ID NO: 156, SEQ ID NO: 157, SEQ ID NO: 158, SEQ ID NO: 159, SEQ ID NO: 160, SEQ ID NO: 161, SEQ ID NO: 162, SEQ ID NO: 163, SEQ ID NO: 164, SEQ ID NO: 165, SEQ ID NO: 166, SEQ ID NO: 167, SEQ ID NO: 168, SEQ ID NO: 169, SEQ ID NO: 170, SEQ ID NO: 171, SEQ ID NO: 172, SEQ ID NO: 173, SEQ ID NO: 174, SEQ ID NO: 175, SEQ ID NO: 177, SEQ ID NO: 178, SEQ ID NO: 179, SEQ ID NO: 180, SEQ ID NO: 181, SEQ ID NO: 182, SEQ ID NO: 183, SEQ ID NO: 184, SEQ ID NO: 185, SEQ ID NO: 186, SEQ ID NO: 187, SEQ ID NO: 188, SEQ ID NO: 189, SEQ ID NO: 190, SEQ ID NO: 191, SEQ ID NO: 192, SEQ ID NO: 193, SEQ ID NO: 194, SEQ ID NO: 196, SEQ ID NO: 197, SEQ ID NO: 198, SEQ ID NO: 199, SEQ ID NO: 200, SEQ ID NO: 201, SEQ ID NO: 202, SEQ ID NO: 203, SEQ ID NO: 204, SEQ ID NO: 205, SEQ ID NO: 206, SEQ ID NO: 207, SEQ ID NO: 208, SEQ ID NO: 209, SEQ ID NO: 210, SEQ ID NO: 211, SEQ ID NO: 212, SEQ ID NO: 213, SEQ ID NO: 214, SEQ ID NO: 215, SEQ ID NO: 216, SEQ ID NO: 217, SEQ ID NO: 218, SEQ ID NO: 219, SEQ ID NO: 220, SEQ ID NO: 221, SEQ ID NO: 222, SEQ ID NO: 223, SEQ ID NO: 224, SEQ ID NO: 225, SEQ ID NO: 226, SEQ ID NO: 227, SEQ ID NO: 228, SEQ ID NO: 229, SEQ ID NO: 230, SEQ ID NO: 231, SEQ ID NO: 232, SEQ ID NO: 233, SEQ ID NO: 234, SEQ ID NO: 235, SEQ ID NO: 236, SEQ ID NO: 551, SEQ ID NO: 552, SEQ ID NO: 553, SEQ ID NO: 554, SEQ ID NO: 555, SEQ ID NO: 556, SEQ ID NO: 557, SEQ ID NO: 558, SEQ ID NO: 559, SEQ ID NO: 560, SEQ ID NO: 561, SEQ ID NO: 562, SEQ ID NO: 563, SEQ ID NO: 564, SEQ ID NO: 565, SEQ ID NO: 566, SEQ ID NO: 567, SEQ ID NO: 568, SEQ ID NO: 569, SEQ ID NO: 570, SEQ ID NO: 571, SEQ ID NO: 572, SEQ ID NO: 573, SEQ ID NO: 574, SEQ ID NO: 575, SEQ ID NO: 576, SEQ ID NO: 577, SEQ ID NO: 578, SEQ ID NO: 579, SEQ ID NO: 580, SEQ ID NO: 581, SEQ ID NO: 582, SEQ ID NO: 583, SEQ ID NO: 584, SEQ ID NO: 585, SEQ ID NO: 586, SEQ ID NO: 587, and SEQ ID NO: 588; wherein the NLP2-3 orthogroup protein has at least 70% sequence identity, at least 75% sequence identity, at least 80% sequence identity, at least 85% sequence identity, at least 90% sequence identity, at least 95% sequence identity, at least 96% sequence identity, at least 97% sequence identity, at least 98% sequence identity, or at least 99% sequence identity to an amino acid sequence selected from the group consisting of SEQ ID NO: 237, SEQ ID NO: 238, SEQ ID NO: 239, SEQ ID NO: 241, SEQ ID NO: 242, SEQ ID NO: 243, SEQ ID NO: 244, SEQ ID NO: 245, SEQ ID NO: 246, SEQ ID NO: 247, SEQ ID NO: 248, SEQ ID NO: 250, SEQ ID NO: 251, SEQ ID NO: 252, SEQ ID NO: 253, SEQ ID NO: 254, SEQ ID NO: 255, SEQ ID NO: 256, SEQ ID NO: 257, SEQ ID NO: 258, SEQ ID NO: 259, SEQ ID NO: 260, SEQ ID NO: 261, SEQ ID NO: 262, SEQ ID NO: 263, SEQ ID NO: 264, SEQ ID NO: 265, SEQ ID NO: 266, SEQ ID NO: 267, SEQ ID NO: 268, SEQ ID NO: 269, SEQ ID NO: 270, SEQ ID NO: 271, SEQ ID NO: 273, SEQ ID NO: 274, SEQ ID NO: 275, SEQ ID NO: 276, SEQ ID NO: 277, SEQ ID NO: 278, SEQ ID NO: 279, SEQ ID NO: 280, SEQ ID NO: 281, SEQ ID NO: 282, SEQ ID NO: 283, SEQ ID NO: 284, SEQ ID NO: 285, SEQ ID NO: 286, SEQ ID NO: 287, SEQ ID NO: 288, SEQ ID NO: 289, SEQ ID NO: 290, SEQ ID NO: 291, SEQ ID NO: 292, SEQ ID NO: 293, SEQ ID NO: 294, SEQ ID NO: 295, SEQ ID NO: 296, SEQ ID NO: 297, SEQ ID NO: 298, SEQ ID NO: 299, SEQ ID NO: 300, SEQ ID NO: 301, SEQ ID NO: 302, SEQ ID NO: 303, SEQ ID NO: 304, SEQ ID NO: 305, SEQ ID NO: 306, SEQ ID NO: 307, SEQ ID NO: 308, SEQ ID NO: 309, SEQ ID NO: 310, SEQ ID NO: 311, SEQ ID NO: 312, SEQ ID NO: 313, SEQ ID NO: 314, SEQ ID NO: 315, SEQ ID NO: 316, SEQ ID NO: 317, SEQ ID NO: 318, SEQ ID NO: 319, SEQ ID NO: 320, SEQ ID NO: 321, SEQ ID NO: 322, SEQ ID NO: 323, SEQ ID NO: 324, SEQ ID NO: 325, SEQ ID NO: 326, SEQ ID NO: 327, SEQ ID NO: 328, SEQ ID NO: 329, SEQ ID NO: 332, SEQ ID NO: 333, SEQ ID NO: 334, SEQ ID NO: 335, SEQ ID NO: 336, SEQ ID NO: 337, SEQ ID NO: 338, SEQ ID NO: 339, SEQ ID NO: 340, SEQ ID NO: 341, SEQ ID NO: 342, SEQ ID NO: 343, SEQ ID NO: 344, SEQ ID NO: 345, SEQ ID NO: 346, SEQ ID NO: 347, SEQ ID NO: 348, SEQ ID NO: 349, SEQ ID NO: 350, SEQ ID NO: 351, SEQ ID NO: 352, SEQ ID NO: 353, SEQ ID NO: 354, SEQ ID NO: 355, SEQ ID NO: 356, SEQ ID NO: 357, SEQ ID NO: 358, SEQ ID NO: 359, SEQ ID NO: 360, SEQ ID NO: 361, SEQ ID NO: 362, SEQ ID NO: 363, SEQ ID NO: 364, SEQ ID NO: 365, SEQ ID NO: 366, SEQ ID NO: 367, SEQ ID NO: 368, SEQ ID NO: 369, SEQ ID NO: 371, SEQ ID NO: 372, SEQ ID NO: 373, SEQ ID NO: 374, SEQ ID NO: 375, SEQ ID NO: 376, and SEQ ID NO: 377; wherein the NLP4 orthogroup protein has at least 70% sequence identity, at least 75% sequence identity, at least 80% sequence identity, at least 85% sequence identity, at least 90% sequence identity, at least 95% sequence identity, at least 96% sequence identity, at least 97% sequence identity, at least 98% sequence identity, or at least 99% sequence identity to an amino acid sequence selected from the group consisting of SEQ ID NO: 378, SEQ ID NO: 379, SEQ ID NO: 380, SEQ ID NO: 381, SEQ ID NO: 382, SEQ ID NO: 383, SEQ ID NO: 384, SEQ ID NO: 385, SEQ ID NO: 386, SEQ ID NO: 387, SEQ ID NO: 388, SEQ ID NO: 389, SEQ ID NO: 390, SEQ ID NO: 391, SEQ ID NO: 392, SEQ ID NO: 393, SEQ ID NO: 394, SEQ ID NO: 395, SEQ ID NO: 396, SEQ ID NO: 397, SEQ ID NO: 398, SEQ ID NO: 399, SEQ ID NO: 400, SEQ ID NO: 401, SEQ ID NO: 402, SEQ ID NO: 403, SEQ ID NO: 404, SEQ ID NO: 405, SEQ ID NO: 406, SEQ ID NO: 408, SEQ ID NO: 409, SEQ ID NO: 410, SEQ ID NO: 411, SEQ ID NO: 412, SEQ ID NO: 413, SEQ ID NO: 414, SEQ ID NO: 415, SEQ ID NO: 417, SEQ ID NO: 418, SEQ ID NO: 419, SEQ ID NO: 420, SEQ ID NO: 421, SEQ ID NO: 422, SEQ ID NO: 423, SEQ ID NO: 424, SEQ ID NO: 425, SEQ ID NO: 426, SEQ ID NO: 427, SEQ ID NO: 428, SEQ ID NO: 429, SEQ ID NO: 430, SEQ ID NO: 431, SEQ ID NO: 432, SEQ ID NO: 433, SEQ ID NO: 434, SEQ ID NO: 435, SEQ ID NO: 436, SEQ ID NO: 437, SEQ ID NO: 438, SEQ ID NO: 439, SEQ ID NO: 440, SEQ ID NO: 441, SEQ ID NO: 442, SEQ ID NO: 443, SEQ ID NO: 444, SEQ ID NO: 445, SEQ ID NO: 446, SEQ ID NO: 447, SEQ ID NO: 448, SEQ ID NO: 449, SEQ ID NO: 450, SEQ ID NO: 451, SEQ ID NO: 452, SEQ ID NO: 453, SEQ ID NO: 455, SEQ ID NO: 456, SEQ ID NO: 457, SEQ ID NO: 458, SEQ ID NO: 459, SEQ ID NO: 460, SEQ ID NO: 461, SEQ ID NO: 462, SEQ ID NO: 463, SEQ ID NO: 464, SEQ ID NO: 465, SEQ ID NO: 466, SEQ ID NO: 467, SEQ ID NO: 468, SEQ ID NO: 469, SEQ ID NO: 470, SEQ ID NO: 471, SEQ ID NO: 472, SEQ ID NO: 473, SEQ ID NO: 474, SEQ ID NO: 475, SEQ ID NO: 476, SEQ ID NO: 477, SEQ ID NO: 478, SEQ ID NO: 479, SEQ ID NO: 480, SEQ ID NO: 481, SEQ ID NO: 482, SEQ ID NO: 483, SEQ ID NO: 484, SEQ ID NO: 485, SEQ ID NO: 486, SEQ ID NO: 487, SEQ ID NO: 488, SEQ ID NO: 489, SEQ ID NO: 490, SEQ ID NO: 491, SEQ ID NO: 492, SEQ ID NO: 493, SEQ ID NO: 494, SEQ ID NO: 495, SEQ ID NO: 496, SEQ ID NO: 497, SEQ ID NO: 498, SEQ ID NO: 499, SEQ ID NO: 500, SEQ ID NO: 501, SEQ ID NO: 502, SEQ ID NO: 504, SEQ ID NO: 505, SEQ ID NO: 506, SEQ ID NO: 507, SEQ ID NO: 508, SEQ ID NO: 509, SEQ ID NO: 510, SEQ ID NO: 511, SEQ ID NO: 512, SEQ ID NO: 513, SEQ ID NO: 514, SEQ ID NO: 515, SEQ ID NO: 516, SEQ ID NO: 517, SEQ ID NO: 518, SEQ ID NO: 519, SEQ ID NO: 520, SEQ ID NO: 521, SEQ ID NO: 522, SEQ ID NO: 523, and SEQ ID NO: 524; or wherein the basal NIN/NLP orthogroup protein has at least 70% sequence identity, at least 75% sequence identity, at least 80% sequence identity, at least 85% sequence identity, at least 90% sequence identity, at least 95% sequence identity, at least 96% sequence identity, at least 97% sequence identity, at least 98% sequence identity, or at least 99% sequence identity to an amino acid sequence selected from the group consisting of SEQ ID NO: 525, SEQ ID NO: 526, SEQ ID NO: 527, SEQ ID NO: 528, SEQ ID NO: 529, SEQ ID NO: 530, SEQ ID NO: 531, SEQ ID NO: 532, SEQ ID NO: 533, SEQ ID NO: 534, SEQ ID NO: 535, SEQ ID NO: 536, SEQ ID NO: 537, SEQ ID NO: 538, SEQ ID NO: 539, SEQ ID NO: 540, SEQ ID NO: 541, SEQ ID NO: 542, SEQ ID NO: 543, SEQ ID NO: 544, SEQ ID NO: 545, SEQ ID NO: 546, SEQ ID NO: 547, SEQ ID NO: 548, SEQ ID NO: 549, and SEQ ID NO: 550.
[0045] 34. A bacterial cell or an Agrobacterium cell comprising the expression vector, isolated DNA molecule, or recombinant nucleic acid of any one of aspects 30-33.
[0046] 35. A genetically modified plant, plant part, plant cell, or seed comprising the expression vector, isolated DNA molecule, or recombinant nucleic acid of any one of aspects 30-33.
[0047] 36. A composition or kit comprising the expression vector, isolated DNA molecule, or recombinant nucleic acid of any one of aspects 30-33, the bacterial cell or Agrobacterium cell of aspect 34, or the genetically modified plant, plant part, plant cell, or seed of aspect 35.
[0048] 37. A non-regenerable part or cell of the genetically modified plant or part thereof of any one of aspects 1-19 or aspect 35.
[0049] 38. A method of inducing symbiotic organogenesis, inducing symbiotic organogenesis in the absence of rhizobial bacteria recognized by the plant, and/or inducing infection of a symbiotic organ comprising introducing a genetic alteration via the expression vector, isolated DNA molecule, or recombinant nucleic acid of any one of aspects 30-33.
[0050] 39. A genetically altered plant genome comprising (i) a first nucleic acid sequence encoding one or more, two or more, three or more, four or more, five or more, six or more, seven or more, eight or more, nine or more, ten or more, eleven or more, twelve or more, thirteen or more, fourteen or more, fifteen or more, sixteen or more, seventeen or more, eighteen or more, nineteen or more, twenty or more, twenty-one or more, twenty-two or more, twenty-three or more, or twenty-four or more auxin response elements (AuxREs) operably linked to a transfected or heterologous second nucleic acid encoding a NIN protein or an NLP protein, or (ii) genetic modifications adding one or more, two or more, three or more, four or more, five or more, six or more, seven or more, eight or more, nine or more, ten or more, eleven or more, twelve or more, thirteen or more, fourteen or more, fifteen or more, sixteen or more, seventeen or more, eighteen or more, nineteen or more, twenty or more, twenty-one or more, twenty-two or more, twenty-three or more, or twenty-four or more AuxREs to a promoter of an endogenous NIN protein or NLP protein.
[0051] 40. A genetically altered plant genome of the plant of any one of aspects 1-19 or aspect 35.

### BRIEF DESCRIPTION OF THE DRAWINGS

[0052] The patent or application file contains at least one drawing executed in color. Copies of this patent or patent application publication with color drawing(s) will be provided by the Office upon request and payment of the necessary fec.

[0053] FIGS. 1A-1C show phylogenetically actinorhizal NINs as distant from the legume counterpart. FIG. 1A shows a maximum likelihood phylogenetic tree showing the NIN gene family within the NFN clade nodulators where the nodulators belonging to Fabales (legumes, bottom) branch away from the actinorhizal NINs (Rosales (top left), Cucurbitales (top center), and Fagales (top right)). All the NINs belonging to the Rosales clade cluster together (top left) indicating their unique identity among the actinorhizal NINs. FIG. 1B shows a box plot of relative expression of Datisca glomerata DgNIN (left) and DgNIN2 (right) in roots, early nodule, late nodule, and mature (senescent) nodule, normalized to DgActin. Values are the mean ΔCt values of 3 biological replicates. The X-axis indicates the tissue investigated; the Y-axis indicates relative expression. FIG. 1C shows a diagram of the NIN protein (top), comprising the N-terminal region (orange) followed by the DNA binding RWP-RK motif (green) and the protein-protein interacting PB1 domain (blue). A sequence alignment of a portion of the N-terminal region is shown below for legume NIN sequences (unshaded) and actinorhizal NIN sequences (shaded). The sequences are, from top to bottom beginning at “Glycine NIN extraction”, SEQ ID NO: 606, SEQ ID NO: 607, SEQ ID NO: 608, SEQ ID NO: 609, SEQ ID NO: 610, SEQ ID NO: 611, SEQ ID NO: 612, SEQ ID NO: 613, SEQ ID NO: 614, SEQ ID NO: 615, SEQ ID NO: 616, SEQ ID NO: 617, SEQ ID NO: 618, SEQ ID NO: 619, SEQ ID NO: 620, SEQ ID NO: 621, SEQ ID NO: 622, SEQ ID NO: 623, SEQ ID NO: 624, SEQ ID NO: 625, SEQ ID NO: 626, SEQ ID NO: 627, SEQ ID NO: 628, SEQ ID NO: 629, and SEQ ID NO: 630. SEQ ID NO: 631 is the Consensus sequence. The Serine whose phosphorylation status is known to be important for nuclear retention in Arabidopsis is shown in the yellow vertical box.

[0054] FIGS. 2A-2Q show nodulation-specific expression of actinorhizal NIN in Datisca glomerata. FIG. 2A shows expression of pDgNIN_5 kb:GUS in an uninoculated control plant in a stereo-fluorescence micrograph. The scale bar indicates 500 μm. FIG. 2B shows expression of pDgNIN_5 kb:GUS in early nodules of roots harvested 8 weeks after infection with clade 2 Frankia Dg1 in a stereo-fluorescence micrograph. The scale bar indicates 500 μm. FIG. 2C shows expression of pDgNIN_5 kb:GUS in a mature nodule of roots harvested 8 weeks after infection with clade 2 Frankia Dg1 in a stereo-fluorescence micrograph. The scale bar indicates 500 μm. FIG. 2D shows ultrastructure analysis of nodule sections stained with ruthenium red (pink coloration) of mature nodules with increased expression in the infection zone (iz) with vesicle formation. Meristem (m) and vascular bundle (vb, arrowhead) are indicated. The scale bar indicates 250 μm. FIG. 2E shows ultrastructure analysis of nodule sections stained with ruthenium red (pink coloration) of mature nodules with increased expression in the infection zone (iz) with vesicle formation. Uninfected cells (*) are also indicated. The scale bar indicates 250 μm. FIG. 2F shows expression of pDg2NIN_5 kb:GUS in an uninoculated control plant in a stereo-fluorescence micrograph. The scale bar indicates 500 μm. FIG. 2G shows expression of pDgNIN2_5 kb:GUS in early nodules of roots harvested 8 weeks after infection with clade 2 Frankia Dg1 in a stereo-fluorescence micrograph. The scale bar indicates 500 μm. FIG. 2H shows expression of pDgNIN2_5 kb:GUS in a mature nodule of roots harvested 8 weeks after infection with clade 2 Frankia Dg1 in a stereo-fluorescence micrograph. The scale bar indicates 500 μm. FIG. 2I shows ultrastructure analysis of nodule sections stained with ruthenium red (pink coloration) of mature nodules with increased expression in the infection zone (iz) with vesicle formation. Vascular bundle (vb, arrowhead) is indicated. The scale bar indicates 250 μm.

[0055] FIG. 2J shows ultrastructure analysis of nodule sections stained with ruthenium red (pink coloration) of mature nodules with increased expression in the infection zone (iz) with vesicle formation. The scale bar indicates 250 μm. FIG. 2K shows expression of pDryasNIN_5 kb:GUS in an uninoculated control plant in a stereo-fluorescence micrograph (top), with a micrograph of the transformation marker mCherry (bottom). The scale bar indicates 500 μm. FIG. 2L shows expression of pDryasNIN_5 kb:GUS in early nodule of roots harvested 8 weeks after infection with clade 2 Frankia Dg1 in a stereo-fluorescence micrograph. The scale bar indicates 500 μm.

[0056] FIG. 2M shows expression of pDryasNIN_5 kb:GUS in mature nodule of roots harvested 8 weeks after infection with clade 2 Frankia Dg1 in a stereo-fluorescence micrograph. The scale bar indicates 500 μm. FIG. 2N shows ultrastructure analysis of nodule sections from roots expressing pDryasNIN:GUS stained with ruthenium red (pink coloration) of matured nodules with expression in infected cells (pink). Vascular bundle (vb, arrowhead) and infection zone (iz) are indicated. The scale bar indicates 250 μm. FIG. 2O shows ultrastructure analysis of nodule sections from roots expressing pDryasNIN:GUS stained with ruthenium red (pink coloration) of matured nodules with expression in infected cells (pink). Vascular bundle (vb, arrowhead) and infection zone (iz) are indicated. The scale bar indicates 250 μm. FIG. 2P shows a stereomicrograph of GUS stained D. glomerata hairy-root transformed roots transformed with pDatisca_glomerata_NIN_5k:GUS. The top panel (P) shows bright field; the bottom panel (P′) shows mCherry fluorescence (transformation marker). The scale bar indicates 500 μm. FIG. 2Q shows semithin sections of GUS stained D. glomerata hairy-root transformed roots transformed with pDatisca_glomerata_NIN_5k:GUS counterstained with ruthenium red. The scale bar indicates 250 μm. Meristem is indicated by ‘m’, cortex is indicated by ‘c’, and vascular bundle is indicated by ‘vb’. FIG. 2R shows a stereomicrograph of GUS stained D. glomerata hairy-root transformed roots transformed with pDryas_drummondii_NIN_5k:GUS. The top panel (R) shows bright field; the bottom panel (R′) shows mCherry fluorescence (transformation marker). The scale bar indicates 500 μm. FIG. 2S shows semithin sections of GUS stained D. glomerata hairy-root transformed roots transformed with pDryas_drummondii_NIN_5k:GUS counterstained with ruthenium red. The scale bar indicates 250 μm. Meristem is indicated by ‘m’, cortex is indicated by ‘c’, and vascular bundle is indicated by ‘vb’.

[0057] FIGS. 3A-3I show that expression of actinorhizal NIN can match pMedicagoNIN promoter expression during nodulation in M. truncatula. FIG. 3A shows a stereo-fluorescence micrograph of A17 M. truncatula hairy-roots showing expression of pMtNINsyn:GUS at 2 weeks after infection (top), and a merged image of S. meliloti 2011 eGFP and transformation marker mCherry fluorescence (bottom, A′). The scale bar indicates 250 μm. FIG. 3B shows a stereo-fluorescence micrograph of A17 M. truncatula hairy-roots showing expression of pMtNINsyn:GUS at 4 weeks after infection (top), and a merged image of S. meliloti 2011 eGFP and the transformation marker mCherry fluorescence (right, B′). The scale bar indicates 500 μm.

[0058] FIG. 3C shows a section at lower (left, C) and higher magnification (right, C′) of A17 M. truncatula hairy-roots showing expression of pMtNINsyn:GUS at 4 weeks after infection, counterstained with Ruthenium red. The scale bar indicates 250 μm. FIG. 3D shows a stereo-fluorescence micrograph of A17 M. truncatula hairy-roots showing expression of pDatiscaNIN_5 kb:GUS at 2 weeks after infection (top), and a merged image of S. meliloti 2011 eGFP and transformation marker mCherry fluorescence (bottom, D′). The scale bar indicates 250 μm. FIG. 3E shows a stereo-fluorescence micrograph of A17 M. truncatula hairy-roots showing expression of pDatiscaNIN_5 kb:GUS at 4 weeks after infection (left), and a merged image of S. meliloti 2011 eGFP and the transformation marker mCherry fluorescence (right, E′). The scale bar indicates 500 μm. FIG. 3F shows a section at lower (left, F) and higher magnification (right, F′) of A17 M. truncatula hairy-roots showing expression of pDatiscaNIN_5 kb:GUS at 4 weeks after infection, counterstained with Ruthenium red. The scale bar indicates 250 μm. FIG. 3G shows a stereo-fluorescence micrograph of A17 M. truncatula hairy-roots showing expression of pDryasNIN_5 kb:GUS at 2 weeks after infection (top), and a merged image of S. meliloti 2011 eGFP and transformation marker mCherry fluorescence (bottom, G′). The scale bar indicates 250 μm. FIG. 3H shows a stereo-fluorescence micrograph of A17 M. truncatula hairy-roots showing expression of pDatiscaNIN_5 kb:GUS at 4 weeks after infection (top), and a merged image of S. meliloti 2011 eGFP and the transformation marker mCherry fluorescence (right, H′). The scale bar indicates 500 μm. FIG. 3I shows a section at lower (left, I) and higher magnification (right, I′) of A17 M. truncatula hairy-roots showing expression of pDryasNIN_5 kb:GUS at 4 weeks after infection, counterstained with Ruthenium red. The scale bar indicates 250 μm.

[0059] FIGS. 4A-4K show that exogenous treatment with a chitinous signaling molecule induces pDatiscaNIN and pDatiscaNIN2 expression. FIG. 4A shows a stereo micrograph of control untreated roots of D. glomerata hairy-root transformed plants carrying a pDgNIN-GUS construct. The bottom panel (A′) shows the boxed region from the top panel (A) at a higher magnification. The scale bar indicates 500 μm. FIG. 4B shows a stereo micrograph of roots of D. glomerata hairy-root transformed plants carrying a pDgNIN-GUS construct, 24 hours after treatment with 10⁻⁷M nonsulphated-LCO (NS-LCO). The bottom panel (B′) shows the boxed region from the top panel (B) at a higher magnification. The scale bar indicates 500 μm. FIG. 4C shows a stereo micrograph of roots of D. glomerata hairy-root transformed plants carrying a pDgNIN-GUS construct, 24 hours after treatment with 10⁻⁷M sulphated-LCO (S-LCO). The bottom panel (C′) shows the boxed region from the top panel (C) at a higher magnification. The scale bar indicates 500 μm. FIG. 4D shows a stereo micrograph of roots of D. glomerata hairy-root transformed plants carrying a pDgNIN-GUS construct, 24 hours after treatment with 10⁻⁷M CO4. The bottom panel (D′) shows the boxed region from the top panel (D) at a higher magnification. The scale bar indicates 500 μm. FIG. 4E shows a stereo micrograph of roots of D. glomerata hairy-root transformed plants carrying a pDgNIN-GUS construct, 24 hours after treatment with 10⁻⁷M CO8. The bottom panel (E′) shows the boxed region from the top panel (E) at a higher magnification. The scale bar indicates 500 μm. FIG. 4F shows a stereo micrograph of control untreated roots of D. glomerata hairy-root transformed plants carrying a pDgNIN2-GUS construct. The bottom panel (F′) shows the boxed region from the top panel (F) at a higher magnification. The scale bar indicates 500 μm. FIG. 4G shows a stereo micrograph of roots of D. glomerata hairy-root transformed plants carrying a pDgNIN2-GUS construct, 24 hours after treatment with 10⁻⁷M nonsulphated-LCO (NS-LCO). The bottom panel (G′) shows the boxed region from the top panel (G) at a higher magnification. The scale bar indicates 500 μm. FIG. 4H shows a stereo micrograph of roots of D. glomerata hairy-root transformed plants carrying a pDgNIN2-GUS construct, 24 hours after treatment with 10⁻⁷M sulphated-LCO (S-LCO). The bottom panel (H′) shows the boxed region from the top panel (H) at a higher magnification. The scale bar indicates 500 μm. FIG. 4I shows a stereo micrograph of roots of D. glomerata hairy-root transformed plants carrying a pDgNIN2-GUS construct, 24 hours after treatment with 10⁻⁷M CO4. The bottom panel (I′) shows the boxed region from the top panel (I) at a higher magnification. The scale bar indicates 500 μm. FIG. 4J shows a stereo micrograph of roots of D. glomerata hairy-root transformed plants carrying a pDgNIN2-GUS construct, 24 hours after treatment with 10⁻⁷M CO8. The bottom panel (J′) shows the boxed region from the top panel (J) at a higher magnification. The scale bar indicates 500 μm. FIG. 4K shows ultrastructure analysis of roots expressing a pDgNIN1-GUS construct (top) or a pDgNIN2-GUS construct (bottom), stained with ruthenium red (pink coloration), 24 hours after treatment with 10⁻⁷M S-LCO. The panels on the right show a higher magnification of the panels on the left. The scale bar indicates 500 μm.

[0060] FIGS. 5A-5G show that downregulation of DgNIN abolishes nodule development in D. glomerata. FIG. 5A shows boxplots representing the nodule number per root in transformed (green, left) and non-transformed (right, purple) hairy-roots of the transgenic plants expressing DgNIN-RNAi (second and fourth columns) as compared to empty vector transformed plants (first and third columns). The box indicates median (thick line) and second through third quartiles. Wilcoxon signed-rank test was used to determine statistical significance, shown by p-value and asterisks over brackets, where * indicates p<0.01; ** indicates p<0.002; *** indicates p<0.0003; indicates p<0.00006. n represents the number of transformed roots scored. The X-axis indicates the treatment; the Y-axis indicates the number of nodules per root. FIG. 5B shows a stereo-fluorescent micrograph (top, B) of empty vector transformed roots and nodules, and a corresponding image (bottom, B′) showing the eGFP transformation marker. The perforated box indicates the region shown at higher magnification in FIG. 5C. The scale bar indicates 500 μm.

[0061] FIG. 5C shows a stereo-fluorescent micrograph (top, C) of empty vector transformed roots and nodules, and a corresponding image (bottom, C′) showing the eGFP transformation marker. The scale bar indicates 500 μm. FIG. 5D shows a stereo-fluorescent micrograph (top, D) of DgNIN-RNAi transformed roots with no nodule formation, and a corresponding image (bottom, D′) showing the eGFP transformation marker. The scale bar indicates 500 μm. FIG. 5E shows a stereo-fluorescent micrograph (top, E) of DgNIN-RNAi transformed roots with cluster root formation, and a corresponding image (bottom, E′) showing the eGFP transformation marker. The perforated box indicates the region shown at higher magnification in FIG. 5F. The perforated line demarcates transformed roots from non-transformed roots. The scale bar indicates 500 μm. FIG. 5F shows a stereo-fluorescent micrograph (top, F) of DgNIN-RNAi transformed roots with cluster root formation, and a corresponding image (bottom, F′) showing the eGFP transformation marker. The perforated line demarcates transformed roots from non-transformed roots. The scale bar indicates 500 μm. FIG. 5G shows boxplots representing the relative expression of DgNIN (left) and DgNIN2 (right) in empty vector transformed roots (pK7_root), empty vector transformed nodule (pK7_nod), and four lines of roots transformed with DgNIN-RNAi (DgNIN_RNAi-2, DgNIN_RNAi-3, DgNIN_RNAi-5, DgNIN_RNAi-7) normalized to DgActin. Values are the mean ΔCt values of 3 biological replicates where T-test determined statistical significance, where * indicates p<0.01; ** indicates p<0.002; *** indicates p<0.0003; **** indicates p<0.00006. The X-axis indicates the construct; the Y-axis indicates relative expression of DgNIN or DgNIN normalized to DgActin.

[0062] FIGS. 6A-6C show spatial difference in expression of pLJUBI vs pDR5. FIG. 6A shows a stereo micrograph of control, uninoculated D. glomerata hairy roots transformed with pLJUBI:GUS. The panel on the right shows a region of the panel on the left at a higher magnification. The scale bar indicates 500 μm. FIG. 6B shows a stereo micrograph of control, uninoculated D. glomerata hairy roots transformed with pDR5:GUS. The panel on the right shows a region of the panel on the left at a higher magnification. The scale bar indicates 500 μm.

[0063] FIG. 6C shows a stereo micrograph of D. glomerata hairy roots transformed with pDR5:GUS eight weeks after infection with clade 2 Frankia Dg1. The panel on the right shows a region of the panel on the left at a higher magnification. The scale bar indicates 500 μm.

[0064] FIGS. 7A-7O show that ectopic expression of NIN disrupts lateral root development and nodulation homeostasis. FIG. 7A shows a stereo-fluorescence micrograph of empty vector transformed roots under control/non-inoculated conditions. The scale bar indicates 500 μm. FIG. 7B shows a stereo-fluorescence micrograph of empty vector transformed roots eight weeks after infection with clade 2 Frankia Dg1. The scale bar indicates 500 μm. FIG. 7C shows a stereo-fluorescence micrograph of a half-section of a nodule with an infection zone (iz) from empty vector transformed roots eight weeks after infection with clade 2 Frankia Dg1. The scale bar indicates 500 μm. FIG. 7D shows a stereo-fluorescence micrograph of pLJUBI: DatiscaNIN transformed roots under control/non-inoculated conditions (top, D), and a corresponding micrograph of the transformation marker mCherry (bottom, D′). The scale bar indicates 500 μm.

[0065] FIG. 7E shows a stereo-fluorescence micrograph of pLJUBI: DatiscaNIN transformed roots eight weeks after infection with clade 2 Frankia Dg1 (top, E), and a corresponding micrograph of the transformation marker mCherry (bottom, E′). The scale bar indicates 500 μm. FIG. 7F shows a stereo-fluorescence micrograph of a half-section of a proliferating structure from pLJUBI: DatiscaNIN transformed roots eight weeks after infection with clade 2 Frankia Dg1 (top, F), and a corresponding micrograph of the transformation marker mCherry (bottom, F′). The scale bar indicates 500 μm. FIG. 7G shows a stereo-fluorescence micrograph of pLJUBI: DatiscaNIN2 transformed roots under control/non-inoculated conditions (top, G), and a corresponding micrograph of the transformation marker mCherry (bottom, G′). FIG. 7H shows a stereo-micrograph of pLJUBI: DatiscaNIN2 transformed roots eight weeks after infection with clade 2 Frankia Dg1 (top, H), and a corresponding micrograph of the transformation marker mCherry (bottom, H′). The scale bar indicates 500 μm. FIG. 7I shows a stereo-fluorescence micrograph of a half-section of a proliferating section from pLJUBI: DatiscaNIN2 transformed roots eight weeks after infection with clade 2 Frankia Dg1 (top, I), and a corresponding micrograph of the transformation marker mCherry (bottom, I′). FIG. 7J shows a stereo-fluorescence micrograph of pLjUBI:DryasNIN transformed roots under control/non-inoculated conditions (top, J), and a corresponding micrograph of the transformation marker mCherry (bottom, J′). The scale bar indicates 500 μm. FIG. 7K shows a stereo-fluorescence micrograph of pLJUBI:DryasNIN transformed roots eight weeks after infection with clade 2 Frankia Dg1 (top, K), and a corresponding micrograph of the transformation marker mCherry (bottom, K′). The scale bar indicates 500 μm. FIG. 7L shows a stereo-fluorescence micrograph of a half-section of a proliferating structure from pLJUBI:DryasNIN transformed roots eight weeks after infection with clade 2 Frankia Dg1 (top, L), and a corresponding micrograph of the transformation marker mCherry (bottom, L′). The scale bar indicates 500 μm. FIG. 7M shows boxplots representing the number of the indicated structures per root of the transgenic plants under control/non-inoculated conditions for each indicated construct. The box indicates median (thick line) and second through third quartiles. From left to right, the graphs indicate the number of cluster roots per root, the number of nodules per root, and the number of pseudonodules per root. Within each graph, from left to right the box plots indicate the following constructs: empty vector, LjUBI: DatiscaNIN, LJUBI: DatiscaNIN2, and LJUBI:DryasNIN. The number at the bottom indicates the number of roots scored. Student's t-test followed by Bonferroni correction indicates statistically significant differences between the observations where **=p<0.001 and *=p<0.03. The values below each box represent the total number of transformed roots scored. FIG. 7N shows boxplots representing the number of the indicated structures per root of the transgenic plants eight weeks after infection with clade 2 Frankia Dg1 for each indicated construct. The box indicates median (thick line) and second through third quartiles. From left to right, the graphs indicate the number of cluster roots per root, the number of nodules per root, and the number of pseudonodules per root. Within each graph, from left to right the box plots indicate the following constructs: empty vector, LjUBI: DatiscaNIN, LJUBI: DatiscaNIN2, and LJUBI:DryasNIN. The number at the bottom indicates the number of roots scored. Student's t-test followed by Bonferroni correction indicates statistically significant differences between the observations where **=p<0.001 and *=p<0.03. The values below each box represent the total number of transformed roots scored. FIG. 7O shows Datisca glomerata hairy roots transformed with pDatiscaNIN:GUS. The top panel (O) shows a bright field image of the roots; the bottom panel (O′) shows an ImageQuant micrograph of mCherry fluorescence (pink, transformation marker) and non-transformed parts (blue mask). The scale bar indicates 2.4 cm. FIG. 7P shows Datisca glomerata hairy roots transformed with pLjUBI:DatiscaNIN. The top panel (P) shows a bright field image of the roots; the bottom panel (P′) shows an ImageQuant micrograph of mCherry fluorescence (pink, transformation marker) and non-transformed parts (blue mask). The scale bar indicates 2.4 cm. FIG. 7Q shows Datisca glomerata hairy roots transformed with pLjUBI:DatiscaNIN2. The top panel (Q) shows a bright field image of the roots; the bottom panel (Q′) shows an ImageQuant micrograph of mCherry fluorescence (pink, transformation marker) and non-transformed parts (blue mask). The scale bar indicates 2.4 cm.

[0066] FIGS. 8A-8P show that both Datisca and Dryas NIN can rescue nodulation in the M. truncatula nin1 mutant. FIG. 8A shows a cartoon illustrating categories of infection thread (IT) phenotypes—curl (left), where the bacteria is trapped in the shepherd's hook; extending (middle), where the infection thread extended to the epidermis but failed to progress further; and patch (right), where the infection thread is misdirected in the epidermal/upper cortical layer. FIG. 8B shows a stereo-fluorescence micrograph of nin1 mutant four weeks after infection with S. meliloti 2011 pNifH-eGFP transformed with empty vector control. The scale bar indicates 250 μm. FIG. 8C shows a stereo-fluorescence micrograph of nin mutant four weeks after infection with S. meliloti 2011 pNifH-eGFP transformed with pMtNINsyn:MtNIN, with infection thread curl phenotype visible as a merge between bright field and eGFP (purple). The scale bar indicates 250 μm. FIG. 8D shows a stereo-fluorescence micrograph of nin mutant four weeks after infection with S. meliloti 2011 pNifH-eGFP transformed with pMtNINsyn:MtNIN, with infection thread extending phenotype visible as a merge between bright field and eGFP (purple). The scale bar indicates 250 μm. FIG. 8E shows a stereo-fluorescence micrograph of nin mutant four weeks after infection with S. meliloti 2011 pNifH-eGFP transformed with pMtNINsyn:MtNIN, with infection thread patch phenotype visible as a merge between bright field and eGFP (purple). The scale bar indicates 250 μm. FIG. 8F shows a stereo-fluorescence micrograph of nin mutant four weeks after infection with S. meliloti 2011 pNifH-eGFP transformed with pMtNINsyn:MtNIN, with nodule phenotype visible as a merge between bright field and eGFP (purple). The scale bar indicates 250 μm. FIG. 8G shows a stereo-fluorescence micrograph of nin mutant four weeks after infection with S. meliloti 2011 pNifH-eGFP transformed with pMtNINsyn:DatiscaNIN, with infection thread curl phenotype visible as a merge between bright field and eGFP (purple). The scale bar indicates 250 μm. FIG. 8H shows a stereo-fluorescence micrograph of nin mutant four weeks after infection with S. meliloti 2011 pNifH-eGFP transformed with pMtNINsyn:DatiscaNIN, with infection thread extending phenotype visible as a merge between bright field and eGFP (purple). The scale bar indicates 250 μm. FIG. 8I shows a stereo-fluorescence micrograph of nin mutant four weeks after infection with S. meliloti 2011 pNifH-eGFP transformed with pMtNINsyn:DatiscaNIN, with infection thread patch phenotype visible as a merge between bright field and eGFP (purple). The scale bar indicates 250 μm. FIG. 8J shows a stereo-fluorescence micrograph of nin mutant four weeks after infection with S. meliloti 2011 pNifH-eGFP transformed with pMtNINsyn:DatiscaNIN, with nodule phenotype visible as a merge between bright field and eGFP (purple). The scale bar indicates 250 μm. FIG. 8K shows a stereo-fluorescence micrograph of nin mutant four weeks after infection with S. meliloti 2011 pNifH-eGFP transformed with pMtNINsyn:DryasNIN, with infection thread curl phenotype visible as a merge between bright field and eGFP (purple). The scale bar indicates 250 μm. FIG. 8L shows a stereo-fluorescence micrograph of nin mutant four weeks after infection with S. meliloti 2011 pNifH-eGFP transformed with pMtNINsyn:DryasNIN, with infection thread extending phenotype visible as a merge between bright field and eGFP (purple). The scale bar indicates 250 μm. FIG. 8M shows a stereo-fluorescence micrograph of nin mutant four weeks after infection with S. meliloti 2011 pNifH-eGFP transformed with pMtNINsyn:DryasNIN, with infection thread patch phenotype visible as a merge between bright field and eGFP (purple). The scale bar indicates 250 μm. FIG. 8N shows a stereo-fluorescence micrograph of nin mutant four weeks after infection with S. meliloti 2011 pNifH-eGFP transformed with pMtNINsyn:DryasNIN, with nodule phenotype visible as a merge between bright field and eGFP (purple). The scale bar indicates 250 μm. FIG. 8O shows boxplots representing the infection thread number with the given phenotype per root, for curl (left), extended (middle), and patch (right) phenotypes. Boxes show median (thick line) and second through third quartiles. Wilcoxon signed-rank test was used to determine statistical significance, shown by p-value and asterisks over brackets, where * indicates p<0.01; ** indicates p<0.002; *** indicates p<0.0003; **** indicates p<0.00006. n represents the number of transformed roots scored. The X-axis indicates the transformed construct; the Y-axis indicates the number of infection threads with the given phenotype per root. FIG. 8P shows boxplots representing the nodule number per root. Boxes show median (thick line) and second through third quartiles, with vertical lines to minimum and maximum. Wilcoxon signed-rank test was used to determine statistical significance, shown by p-value and asterisks over brackets, where * indicates p<0.01; ** indicates p<0.002; *** indicates p<0.0003; **** indicates p<0.00006. n represents the number of transformed roots scored. The X-axis indicates the background and transformed construct; the Y-axis indicates the number of nodules per root.

[0067] FIGS. 9A-9F show the presence of auxin responsive elements (AuxREs) in the promoter of NIN. FIG. 9A shows boxplots representing the relative expression of DgNIN (left) and DgNIN2 (right) in D. glomerata wild-type plant roots 10 days post treatment (DPT) with mock (control) versus 100⁻⁶M NAA, normalized to DgActin. Values are the mean ΔCt values of 3 biological replicates. Boxes show median (thick line) and second through third quartiles. T-test was used to determine statistical significance, shown by p-value and asterisks over brackets, where * indicates p<0.01; ** indicates p<0.002; *** indicates p<0.0003; **** indicates p<0.00006. The X-axis indicates the treatment; the Y-axis indicates the relative expression. FIG. 9B shows bar graphs representing the relative expression of MtNIN in M. truncatula roots treated with, from left to right, mock treatment, 0.1 μM IBA (Indole-3-butyric acid), 1 μM IBA, or 10 μM IBA for 16 hours (left panel) and 2 days (right panel). Significance and p-values are listed about the bars. FIG. 9C shows bar graphs representing the relative expression of MtNIN in M. truncatula roots treated with, from left to right, mock treatment, 0.1 μM 2,4D (2,4-Dichlorophenoxyacetic acid), 1 μM 2,4D, or 10 μM 2,4D for 16 hours (left panel) and 2 days (right panel). Significance and p-values are listed about the bars. FIG. 9D shows bar graphs representing the relative expression of MtNIN in M. truncatula roots treated with, from left to right, mock treatment, 0.1 μM NAA (1-Napthaleneacetic acid), 1 μM NAA, or 10 μM NAA for 16 hours (left panel) and 2 days (right panel). Significance and p-values are listed about the bars. Student's t-test followed by Bonferroni correction indicates statistically significant differences between the observations where ***=p<0.0003, **=p<0.003, and *=p<0.01. FIG. 9E shows a ridge plot of the region between the cyclops bindings site (PACE)(grey bar at 0) and the transcriptional start site ATG, showing the position of the two putative auxin response elements (AuxRE) in the promoter of the legume (top) and actinorhizal (bottom) NIN. The X-axis shows number of nucleotides from PACE. Within each plot, the TGTCTN (orange) motif is represented higher up than the TGTCTC motif (blue). FIG. 9F shows family-based plots for the AuxRE, indicating the presence of putative AuxREs in the following families from top to bottom: Vicioid clade, Loteae, Phaseoleae, Dalbergieae, Genisteae, Casuarinaceae, Betulaceae, Cannabaceae, Cucurbitaceae, Rhamnaceae, and Rosaceae. Each bar in the plot represents one motif, which are normalized in height depending upon the proximity of the next motif. The TGTCTN motif is shown in orange, and the TGTCTC motif is shown in blue. The sequences used for this analysis were SEQ ID NO: 589, SEQ ID NO: 590, SEQ ID NO: 591, SEQ ID NO: 592, SEQ ID NO: 593, SEQ ID NO: 594, SEQ ID NO: 595, SEQ ID NO: 596, SEQ ID NO: 597, SEQ ID NO: 598, SEQ ID NO: 599, SEQ ID NO: 600, SEQ ID NO: 601, SEQ ID NO: 602, SEQ ID NO: 603, SEQ ID NO: 604, and SEQ ID NO: 605.

[0068] FIGS. 10A-10O show that synthetic auxin responsive promoter-driven NIN can induce spontaneous nodulation in D. glomerata. FIG. 10A shows a cartoon representation of the design for the experimental constructs pDR5:DatiscaNIN (top) and pDR5:DryasNIN (bottom). FIG. 10B shows a stereo-fluorescence micrograph of roots transformed with an empty vector under control/non-inoculated conditions. FIG. 10C shows a stereo-fluorescence micrograph of normal nodules in roots transformed with an empty vector eight weeks after infection with clade 2 Frankia Dg1. FIG. 10D shows a stereo-fluorescence micrograph of spontaneous nodule-like structures forming in roots transformed with pDR5:DatiscaNIN under control/non-inoculated conditions (top, D), and a corresponding micrograph of the transformation marker mCherry (bottom, D′). The scale bar indicates 500 μm. FIG. 10E shows a stereo-fluorescence micrograph of merged structures forming in roots transformed with pDR5:DatiscaNIN under control/non-inoculated conditions (top, E), and a corresponding micrograph of the transformation marker mCherry (bottom, E′). The scale bar indicates 500 μm. FIG. 10F shows a stereo-fluorescence micrograph of spontaneous nodule-like structures forming in roots transformed with pDR5:DatiscaNIN eight weeks after inoculation with clade 2 Frankia Dg1 (top, F), and a corresponding micrograph of the transformation marker mCherry (bottom, F′). The scale bar indicates 500 μm. FIG. 10G shows a stereo-fluorescence micrograph of nodules in roots transformed with pDR5:DatiscaNIN eight weeks after inoculation with clade 2 Frankia Dg1 (top, G), and a corresponding micrograph of the transformation marker mCherry (bottom, G′). The scale bar indicates 500 μm. FIG. 10H shows boxplots representing the number of bumps per root under control (left; green) and inoculated (right; purple) conditions for roots transformed with Empty vector (first and fourth columns), pDR5:DatiscaNIN (second and fifth columns), and pDR5:DryasNIN (third and sixth columns). The box indicates median (thick line) and second through third quartiles. Wilcoxon signed-rank test was used to determine statistical significance, shown by p-value and asterisks over brackets, where * indicates p<0.01; ** indicates p<0.002; *** indicates p<0.0003; **** indicates p<0.00006. n represents the number of transformed roots scored. The X-axis indicates the treatment; the Y-axis indicates the number of bumps per root. FIG. 10I shows boxplots representing the number of merged structures per root under control (left; green) and inoculated (right; purple) conditions for roots transformed with Empty vector (first and fourth columns), pDR5:DatiscaNIN (second and fifth columns), and pDR5:DryasNIN (third and sixth columns). The box indicates median (thick line) and second through third quartiles, with vertical lines to minimum and maximum. Wilcoxon signed-rank test was used to determine statistical significance, shown by p-value and asterisks over brackets, where * indicates p<0.01; ** indicates p<0.002; *** indicates p<0.0003; **** indicates p<0.00006. n represents the number of transformed roots scored. The X-axis indicates the treatment; the Y-axis indicates the number of merged structures per root. FIG. 10J shows a stereo-fluorescence micrograph of spontaneous nodule-like structures forming in roots transformed with pDR5:DryasNIN under control/non-inoculated conditions (top, J), and a corresponding micrograph of the transformation marker mCherry (bottom, J′). The scale bar indicates 500 μm. FIG. 10K shows a stereo-fluorescence micrograph of merged structures forming in roots transformed with pDR5:DryasNIN under control/non-inoculated conditions (top, K), and a corresponding micrograph of the transformation marker mCherry (bottom, K′). The scale bar indicates 500 μm. FIG. 10L shows a stereo-fluorescence micrograph of spontaneous nodule-like structures forming in roots transformed with pDR5:DryasNIN eight weeks after inoculation with clade 2 Frankia Dg1 (top, L), and a corresponding micrograph of the transformation marker mCherry (bottom, L′). The scale bar indicates 500 μm. FIG. 10M shows a stereo-fluorescence micrograph of nodules in roots transformed with pDR5:DryasNIN eight weeks after inoculation with clade 2 Frankia Dg1 (top, M), and a corresponding micrograph of the transformation marker mCherry (bottom, M′). The scale bar indicates 500 μm. FIG. 10N shows boxplots representing the number of nodules per root under control (left; green) and inoculated (right; purple) conditions for roots transformed with Empty vector (first and fourth columns), pDR5:DatiscaNIN (second and fifth columns), and pDR5:DryasNIN (third and sixth columns). The box indicates median (thick line) and second through third quartiles. Wilcoxon signed-rank test was used to determine statistical significance, shown by p-value and asterisks over brackets, where * indicates p<0.01; ** indicates p<0.002; *** indicates p<0.0003; **** indicates p<0.00006. n represents the number of transformed roots scored. The X-axis indicates the treatment; the Y-axis indicates the number of nodules per root. FIG. 10O shows ultrastructure analysis of nodule like-structure induced by synthetic auxin responsive promoter driving NIN. Panels 1, 2, 4, 5, 7, and 8 show stereomicrographs of hairy-root transformed roots showing semi-thin sections stained with toluidine blue for: Panels 1-2: clade 2 Frankia Dg1 induced nodules in empty vector control (8 weeks post infection); Panels 4-5: nodule like-structures in roots transformed with pDR5:DatiscaNIN; Panels 7-8: nodule=like structures in roots transformed with pDR5:DryasNIN. Micrographs of nodules are shown in panel 3; micrographs of nodule-like structures are shown in panels 6 and 9. The scale bars indicate: Panels 1, 4, 7: 500 m; Panels 2, 3, 5, 6, 8, and 9: 250 μm.

[0069] FIGS. 11A-11J show pDR5:GUS promoter activity in D. glomerata versus M. truncatula A17 and nin1 mutant. FIG. 11A shows a stereo-fluorescence micrograph showing pDR5:GUS activity in hairy roots of D. glomerata under control/non-inoculated conditions. The scale bar indicates 500 μm. FIG. 11B shows a stereo-fluorescence micrograph showing pDR5:GUS activity in hairy roots of D. glomerata eight weeks after infection with clade 2 Frankia Dg1. The scale bar indicates 500 μm. FIG. 11C shows a stereo-fluorescence micrograph showing pDR5:GUS activity in hairy roots of M. truncatula under control/non-inoculated conditions. The scale bar indicates 500 μm. FIG. 11D shows a stereo-fluorescence micrograph showing pDR5:GUS activity in hairy roots of M. truncatula eight weeks after infection with S. meliloti 2011 eGFP. The scale bar indicates 500 μm. FIG. 11E shows a stereo-fluorescence micrograph showing pDR5:GUS activity in hairy roots of M. truncatula under control/non-inoculated conditions. The scale bar indicates 500 μm. FIG. 11F shows a stereo-fluorescence micrograph showing pDR5:GUS activity in hairy roots of M. truncatula eight weeks after infection with S. meliloti 2011 eGFP. The scale bar indicates 500 μm. FIG. 11G shows a stereo-fluorescence micrograph showing pDR5:GUS activity in hairy roots of M. truncatula nin1 under control/non-inoculated conditions. The scale bar indicates 500 μm. FIG. 11H shows a stereo-fluorescence micrograph showing pDR5:GUS activity in hairy roots of M. truncatula nin1 eight weeks after infection with S. meliloti 2011 eGFP. The scale bar indicates 500 μm. FIG. 11I shows a stereo-fluorescence micrograph showing pDR5:GUS activity in hairy roots of M. truncatula nin1 under control/non-inoculated conditions. The scale bar indicates 500 μm. FIG. 11J shows a stereo-fluorescence micrograph showing pDR5:GUS activity in hairy roots of M. truncatula nin1 eight weeks after infection with S. meliloti 2011 eGFP. The scale bar indicates 500p m.

[0070] FIGS. 12A-12J show that synthetic auxin responsive promoter-driven NIN affects infection in M. truncatula nin1 mutant. FIG. 12A shows a stereo-fluorescence micrograph of nin1 mutant four weeks after infection with S. meliloti 2011 pNifH-eGFP transformed with pMtNINsyn:MtNIN where infection thread progresses with the formation of a primordia. Infection is represented as a merge between bright field and eGFP (purple). FIG. 12B shows a stereo-fluorescence micrograph of nin1 mutant four weeks after infection with S. meliloti 2011 pNifH-eGFP transformed with pMtNINsyn:MtNIN where infection thread progresses with nodule formation. Infection is represented as a merge between bright field and eGFP (purple). FIG. 12C shows a stereo-fluorescence micrograph of nin1 mutant four weeks after infection with S. meliloti 2011 pNifH-eGFP transformed with pDryasNIN_5kb:DryasNIN where infection patch is visible. Infection is represented as a merge between bright field and eGFP (purple). FIG. 12D shows a stereo-fluorescence micrograph of nin1 mutant four weeks after infection with S. meliloti 2011 pNifH-eGFP transformed with pDryasNIN_5kb:DryasNIN where an extended infection thread reaching the epidermal layer is visible. Infection is represented as a merge between bright field and eGFP (purple). FIG. 12E shows a stereo-fluorescence micrograph of nin1 mutant four weeks after infection with S. meliloti 2011 pNifH-eGFP transformed with pDR5:MtNIN where infection curl is visible (arrowhead) in which bacteria failed to progress beyond the shepherd's hook. Infection is represented as a merge between bright field and eGFP (purple). FIG. 12F shows a stereo-fluorescence micrograph of nin1 mutant four weeks after infection with S. meliloti 2011 pNifH-eGFP transformed with pDR5:MtNIN where infection patch is visible. Infection is represented as a merge between bright field and eGFP (purple). FIG. 12G shows a stereo-fluorescence micrograph of nin1 mutant four weeks after infection with S. meliloti 2011 pNifH-eGFP transformed with pDR5:DryasNIN where infection curl is visible. Infection is represented as a merge between bright field and eGFP (purple, arrowhead). FIG. 12H shows a stereo-fluorescence micrograph of nin1 mutant four weeks after infection with S. meliloti 2011 pNifH-eGFP transformed with pDR5:DryasNIN where infection patch is visible. Infection is represented as a merge between bright field and eGFP (purple). FIG. 12I shows boxplots representing the number of infection threads per root for curl (left), extended (middle) and patch (right) infection thread phenotypes. The box indicates median (thick line) and second through third quartiles. Wilcoxon signed-rank test was used to determine statistical significance, shown by p-value and asterisks over brackets, where * indicates p<0.01; ** indicates p<0.002; *** indicates p<0.0003; **** indicates p<0.00006. n represents the number of transformed roots scored. The X-axis indicates the construct; the Y-axis indicates the number of infection threads of the given phenotype per root. FIG. 12J shows boxplots representing the number of nodules per root. The box indicates median (thick line) and second through third quartiles. Wilcoxon signed-rank test was used to determine statistical significance, shown by p-value and asterisks over brackets, where * indicates p<0.01; ** indicates p<0.002; *** indicates p<0.0003; **** indicates p<0.00006. n represents the number of transformed roots scored. The X-axis indicates the construct; the Y-axis indicates the number of nodules per root.

[0071] FIGS. 13A-13R show that synthetic auxin responsive promoter-driven NIN affect infection and nodulation in M. truncatula A17. FIG. 13A shows a stereo-fluorescence micrograph of an A17 plant at four weeks after infection with S. meliloti 2011 pNifH-eGFP transformed with pDR5:GUS, where infection thread formation is represented as merged bright field and eGFP (purple) (top, A), and a corresponding micrograph of eGFP+mCherry (transformation marker) (bottom, A′). FIG. 13B shows a stereo-fluorescence micrograph of an A17 plant at four weeks after infection with S. meliloti 2011 pNifH-eGFP transformed with pDR5:MtNIN, where infection thread formation is represented as merged bright field and eGFP (purple) (top, B), and a corresponding micrograph of eGFP+mCherry (transformation marker) (bottom, B′). FIG. 13C shows a stereo-fluorescence micrograph of an A17 plant at four weeks after infection with S. meliloti 2011 pNifH-eGFP transformed with pDR5:DryasNIN, where infection thread formation is represented as merged bright field and eGFP (purple) (top, C), and a corresponding micrograph of eGFP+mCherry (transformation marker) (bottom, C′). FIG. 13D shows a stereo-fluorescence micrograph of an A17 plant at four weeks after infection with S. meliloti 2011 pNifH-eGFP transformed with pDR5:DatiscaNIN, where infection thread formation is represented as merged bright field and eGFP (purple) (top, D), and a corresponding micrograph of eGFP+mCherry (transformation marker) (bottom, D′). FIG. 13E shows a stereo-fluorescence micrograph of nodules on an A17 plant at four weeks after infection with S. meliloti 2011 pNifH-eGFP transformed with pDR5:GUS, where nodules are represented as merged eGFP+mCherry. FIG. 13F shows a stereo-fluorescence micrograph of nodules on an A17 plant at four weeks after infection with S. meliloti 2011 pNifH-eGFP transformed with pDR5:MtNIN, where nodules are represented as merged eGFP+mCherry. FIG. 13G shows a stereo-fluorescence micrograph of nodules on an A17 plant at four weeks after infection with S. meliloti 2011 pNifH-eGFP transformed with pDR5:DryasNIN, where nodules are represented as merged eGFP+mCherry. FIG. 13H shows a stereo-fluorescence micrograph of nodules on an A17 plant at four weeks after infection with S. meliloti 2011 pNifH-eGFP transformed with pDR5:DatiscaNIN, where nodules are represented as merged eGFP+mCherry. FIG. 13I shows a stereo-fluorescence micrograph of A17:Enod11-GUS plants at four weeks after infection with S. meliloti 2011 pNifH-eGFP transformed with pDR5:GUS, where infection thread formation is visible at the expression site of pENOD11 representing successful primordia formation. FIG. 13J shows a stereo-fluorescence micrograph of A17:Enod11-GUS plants at four weeks after infection with S. meliloti 2011 pNifH-eGFP transformed with pDR5:MtNIN, where infection thread formation is visible at the expression site of pENOD11 representing successful primordia formation. FIG. 13K shows a stereo-fluorescence micrograph of A17:Enod11-GUS plants at four weeks after infection with S. meliloti 2011 pNifH-eGFP transformed with pDR5:DryasNIN, where infection thread formation is visible at the expression site of pENOD11 representing successful primordia formation. FIG. 13L shows a stereo-fluorescence micrograph of A17:Enod11-GUS plants at four weeks after infection with S. meliloti 2011 pNifH-eGFP transformed with pDR5:DatiscaNIN, where infection thread formation is visible at the expression site of pENOD11 representing successful primordia formation. FIG. 13M shows a stereo-fluorescence micrograph of A17:Enod11-GUS plants at four weeks after infection with S. meliloti 2011 pNifH-eGFP transformed with pDR5:GUS, where nodulation formation is visible. FIG. 13N shows a stereo-fluorescence micrograph of A17:Enod11-GUS plants at four weeks after infection with S. meliloti 2011 pNifH-eGFP transformed with pDR5:MtNIN, where nodulation formation is visible. FIG. 13O shows a stereo-fluorescence micrograph of A17:Enod11-GUS plants at four weeks after infection with S. meliloti 2011 pNifH-eGFP transformed with pDR5:DryasNIN, where nodulation formation is visible. FIG. 13P shows a stereo-fluorescence micrograph of A17:Enod11-GUS plants at four weeks after infection with S. meliloti 2011 pNifH-eGFP transformed with pDR5:DatiscaNIN, where nodulation formation is visible. FIG. 13Q shows boxplots representing number of infection threads per root for plants transformed with Empty vector (first column), pDR5:MtNIN (second column), pDR5:DryasNIN (third column), and pDR5:DatiscaNIN (fourth column). The box indicates median (thick line) and second through third quartiles, with vertical lines to minimum and maximum. The X-axis indicates the construct; the Y-axis indicates the number of infection threads per root scored. FIG. 13R shows boxplots representing number of mature nodules per root (left; blue) or number of primordia per root (right; grey) for plants transformed with Empty vector (first and fifth columns), pDR5:MtNIN (second and sixth columns), pDR5:DryasNIN (third and seventh columns), and pDR5:DatiscaNIN (fourth and eighth columns). The box indicates median (thick line) and second through third quartiles, with vertical lines to minimum and maximum. The X-axis indicates the construct; the Y-axis indicates the number of nodules per root scored. Two way ANOVA followed by Tukey-Kramer pairwise comparison was performed to calculate significant different. Significant interactions are represented as single letter codes, where different codes represent significant differences.

[0072] FIGS. 14A-14U show that auxin responsive elements (AuxRE) in the NIN promoter are essential for NIN expression. FIG. 14A shows a stereo-fluorescence micrograph of nodules of Mt nin1 mutant hairy roots transformed with pMtNINsyn-MtNIN four weeks after infection. The upper panel shows bright field and S. meliloti 2011 (pink coloration); the lower panel shows mCherry (red, transformation marker) and S. meliloti 2011 (green coloration). The scale bar=500 μm. FIG. 14B shows a stereo-fluorescence micrograph of a nodule in Mt nin1 mutant hairy roots transformed with pMtNINsyn-MtNIN four weeks after infection. The upper panel shows bright field and S. meliloti 2011 (pink coloration); the lower panel shows mCherry (red, transformation marker) and S. meliloti 2011 (green coloration). The scale bar=250 μm. FIG. 14C shows a stereo-fluorescence micrograph of primordia in Mt nin1 mutant hairy roots transformed with pMtNINsyn-MtNIN four weeks after infection. The upper panel shows bright field and S. meliloti 2011 (pink coloration); the lower panel shows mCherry (red, transformation marker) and S. meliloti 2011 (green coloration). The scale bar=250 μm. FIG. 14D shows a stereo-fluorescence micrograph of extending infection in Mt nin1 mutant hairy roots transformed with pMtNINsyn-MtNIN four weeks after infection. The upper panel shows bright field and S. meliloti 2011 (pink coloration); the lower panel shows mCherry (red, transformation marker) and S. meliloti 2011 (green coloration). The scale bar=250 μm. FIG. 14E shows a stereo-fluorescence micrograph of infection patches and curls in Mt nin1 mutant hairy roots transformed with pMtNINsyn-MtNIN four weeks after infection. The upper panel shows bright field and S. meliloti 2011 (pink coloration); the lower panel shows mCherry (red, transformation marker) and S. meliloti 2011 (green coloration). The scale bar=250 μm. FIG. 14F shows a stereo-fluorescence micrograph of Mt nin1 mutant hairy roots transformed with pMtNINsyn_AuxREmut-MtNIN four weeks after infection. The upper panel shows bright field and S. meliloti 2011 (pink coloration); the lower panel shows mCherry (red, transformation marker) and S. meliloti 2011 (green coloration). The scale bar=500 μm. FIG. 14G shows a stereo-fluorescence micrograph of a nodule in Mt nin1 mutant hairy roots transformed with pMtNINsyn_AuxREmut-MtNIN four weeks after infection. The upper panel shows bright field and S. meliloti 2011 (pink coloration); the lower panel shows mCherry (red, transformation marker) and S. meliloti 2011 (green coloration). The scale bar=250 μm. FIG. 14H shows a stereo-fluorescence micrograph of primordia in Mt nin1 mutant hairy roots transformed with pMtNINsyn_AuxREmut-MtNIN four weeks after infection. The upper panel shows bright field and S. meliloti 2011 (pink coloration); the lower panel shows mCherry (red, transformation marker) and S. meliloti 2011 (green coloration). The scale bar=250 μm. FIG. 14I shows a stereo-fluorescence micrograph of extending infection thread in Mt nin1 mutant hairy roots transformed with pMtNINsyn_AuxREmut-MtNIN four weeks after infection. The upper panel shows bright field and S. meliloti 2011 (pink coloration); the lower panel shows mCherry (red, transformation marker) and S. meliloti 2011 (green coloration). The scale bar=250 μm. FIG. 14J shows a stereo-fluorescence micrograph of infection patches and curls in Mt nin1 mutant hairy roots transformed with pMtNINsyn_AuxREmut-MtNIN four weeks after infection. The upper panel shows bright field and S. meliloti 2011 (pink coloration); the lower panel shows mCherry (red, transformation marker) and S. meliloti 2011 (green coloration). The scale bar=250 μm. FIG. 14K shows a stereomicrograph of GUS staining of lateral root primordia in an M. truncatula nin1 mutant root transformed with pDR5-GUS under control uninoculated conditions. FIG. 14L shows a stereomicrograph of GUS staining of early stages of infection of an M. truncatula nin1 root transformed with pMtNINsyn-MtNIN-pDR5-GUS four weeks after infection. FIG. 14M shows a stereomicrograph of GUS staining of mature nodule development of an M. truncatula nin1 root transformed with pMtNINsyn-MtNIN-pDR5-GUS four weeks after infection. FIG. 14N shows a stereomicrograph of GUS staining of primordia of an M. truncatula nin1 root transformed with pMtNINsyn_AuxREmut-MtNIN-pDR5-GUS four weeks after infection. FIG. 14O shows a stereomicrograph of GUS staining of more mature nodule development of an M. truncatula nin1 root transformed with pMtNINsyn_AuxREmut-MtNIN-pDR5-GUS four weeks after infection. FIG. 14P shows a stereomicrograph of GUS staining of an M. truncatula nin1::ENOD11-GUS mutant root under control uninoculated conditions. FIG. 14Q shows a stereomicrograph of GUS staining of early stages of infection of an M. truncatula nin1::ENOD11-GUS root transformed with pMtNINsyn-MtNIN four weeks after infection. FIG. 14R shows a stereomicrograph of GUS staining of mature nodule development of an M. truncatula nin1::ENOD11-GUS root transformed with pMtNINsyn-MtNIN four weeks after infection. FIG. 14S shows a stereomicrograph of GUS staining of early stages of infection of an M. truncatula nin.::ENOD11-GUS root transformed with pMtNINsyn_AuxREmut-MtNIN four weeks after infection. FIG. 14T shows a stereomicrograph of GUS staining of more mature nodule development of an M. truncatula nin1::ENOD11-GUS root transformed with pMtNINsyn_AuxREmut-MtNIN four weeks after infection. For FIGS. 14K-14T, grey shading indicates GUS staining and darker grey coloration indicates S. meliloti 2011 pNifH-GFP; the scale bar=250 μm. FIG. 14U shows bar graphs of the number of infection events per transformed root for the indicated constructs. From top to bottom, the constructs are: pMtNINsyn_AuxREmut:MtNIN-pDR5:GUS, pMtNNsyn_AuxREmut:MtNIN, pMtNINsyn:MtNIN-pDR5:GUS, and pMtNINsyn:MtNIN. From left to right, the graphs show the number of the following infection events per transformed root:top:curl, extended, patch; bottom:primordia, nodule. Significance is indicated by p-value. Statistical significance between the observations is calculated using Student's t-test followed by Bonferroni correction, where **=p<0.002 and *=p<0.02. FIG. 14V shows a ridge plot of the region between the cyclops bindings site (PACE)(grey bar at 0) and the transcriptional start site ATG, showing the position of the two putative auxin response elements (AuxRE) in the promoter of the legume NIN. The X-axis shows number of nucleotides from PACE. The TGTCTN (orange) motif is represented higher up than the TGTCTC motif (blue). Below the graph are sequences with the auxin responsive elements (AuxREs) from the wildtype promoter (pMtNINsyn, top; left: SEQ ID NO: 643, right: SEQ ID NO: 645) and a mutated form of the promoter (pMtNINsynAuxREmut, bottom; left: SEQ ID NO: 644, right: SEQ ID NO: 646).

[0073] FIGS. 15A-15E show that NIN overexpression is toxic for plants, leading to senescence. FIG. 15A shows images of a Nicotiana benthamiana leaf transiently overexpressing N-terminal tagged pLjUBI-Staygold-NIN-tNOS-p35S-mCherry-t35S, three days post infiltration. From left to right, images are brightfield, mCherry, Staygold, and UV. The scale bar=2.4 cm.

[0074] FIG. 15B shows images of a Nicotiana benthamiana leaf transiently overexpressing N-terminal tagged pMtNINsyn-GUS-tNOS-p35S-mCherry-t35S, three days post infiltration. From left to right, images are brightfield, mCherry, Staygold, and UV. The scale bar-2.4 cm. FIG. 15C shows images of a Nicotiana benthamiana leaf transiently overexpressing helper plasmid p19 three days post infiltration. From left to right, images are brightfield, mCherry, Staygold, and UV. The scale bar=2.4 cm. FIG. 15D shows a microscopy image of an N. benthamiana leaf transiently overexpressing N-terminal tagged pMtNINsyn-GUS-tNOS-p35S-mCherry-t35S (left) or N-terminal tagged pLjUBI-Staygold-NIN-tNOS-p35S-mCherry-t35S (right), three days post infiltration. The scale bar=250 μm. FIG. 15E shows box plots of the ratio of infiltrated area/senescent area for N. benthamiana leaves three days after infiltration with the indicated constructs. From top to bottom, constructs are: pLjUBI-Staygold-NIN-tNOS-p35S-mCherry-t35S, pMtNINsyn-GUS-tNOS-p35S-mCherry-t35S, and p19.

[0075] FIGS. 16A-16F show that nitrogen (N) and phosphate (P) deficiency can trigger auxin signaling in Fragaria vesca (strawberry). FIG. 16A shows a stereo-fluorescence micrograph of stable transgenic lines of F. vesca expressing pDR5:GUS under control conditions (+N+P), where GUS staining represents the readout for auxin signaling (top, A), and a magnified image of the same region (bottom, A′). The scale bar indicates 500 μm. FIG. 16B shows a stereo-fluorescence micrograph of stable transgenic lines of F. vesca expressing pDR5:GUS under conditions with exogenous auxin (+N+P+NAA), where GUS staining represents the readout for auxin signaling (top, B), and a magnified image of the same region (bottom, B′). The scale bar indicates 500 μm. FIG. 16C shows a stereo-fluorescence micrograph of stable transgenic lines of F. vesca expressing pDR5:GUS under nitrogen deficient conditions (−N+P), where GUS staining represents the readout for auxin signaling (top, C), and a magnified image of the same region (bottom, C′). The scale bar indicates 500 μm. FIG. 16D shows a stereo-fluorescence micrograph of stable transgenic lines of F. vesca expressing pDR5:GUS under nitrogen deficient conditions with exogenous auxin (−N+P+NAA), where GUS staining represents the readout for auxin signaling (top, D), and a magnified image of the same region (bottom, D′). The scale bar indicates 500 μm. FIG. 16E shows a stereo-fluorescence micrograph of stable transgenic lines of F. vesca expressing pDR5:GUS under phosphate deficient conditions (+N−P), where GUS staining represents the readout for auxin signaling (top, E), and a magnified image of the same region (bottom, E′). The scale bar indicates 500 μm. FIG. 16F shows a stereo-fluorescence micrograph of stable transgenic lines of F. vesca expressing pDR5:GUS under phosphate deficient conditions with exogenous auxin (+N−P+NAA), where GUS staining represents the readout for auxin signaling (top, F), and a magnified image of the same region (bottom, F′). The scale bar indicates 500 μm.

[0076] FIGS. 17A-17M show that DryasNIN driven by a synthetic auxin responsive promoter can trigger organogenesis of nodule-like structures (NLS) in F. vesca in the presence of auxin. FIG. 17A shows a stereo-fluorescence micrograph of stable transgenic lines of F. vesca expressing pDR5:GUS (control), treated under control conditions (+N+P) for four weeks on plates (top, A), and a corresponding micrograph of the transformation marker mCherry (bottom, A′). FIG. 17B shows a stereo-fluorescence micrograph of stable transgenic lines of F. vesca expressing pDR5:GUS (control), treated with exogenous auxin (+N+P+NAA) for four weeks on plates (top, B), and a corresponding micrograph of the transformation marker mCherry (bottom, B′). Few nodule-like structures are visible, well-spaced from one another. FIG. 17C shows a stereo-fluorescence micrograph of stable transgenic lines of F. vesca expressing pDR5:GUS (control), treated under nitrogen deficient conditions (−N+P) for four weeks on plates (top, C), and a corresponding micrograph of the transformation marker mCherry (bottom, C′). FIG. 17D shows a stereo-fluorescence micrograph of stable transgenic lines of F. vesca expressing pDR5:GUS (control), treated under nitrogen deficient conditions with exogenous auxin (−N+P+NAA) for four weeks on plates (top, D), and a corresponding micrograph of the transformation marker mCherry (bottom, D′). Few nodule-like structures are visible, well-spaced from one another. FIG. 17E shows a stereo-fluorescence micrograph of stable transgenic lines of F. vesca expressing pDR5:GUS (control), treated under phosphate deficient conditions (+N−P) for four weeks on plates (top, E), and a corresponding micrograph of the transformation marker mCherry (bottom, E′). FIG. 17F shows a stereo-fluorescence micrograph of stable transgenic lines of F. vesca expressing pDR5:GUS (control), treated under phosphate deficient conditions with exogenous auxin (+N−P+NAA) for four weeks on plates (top, F), and a corresponding micrograph of the transformation marker mCherry (bottom, F′). Few nodule-like structures are visible, well-spaced from one another. FIG. 17G shows a stereo-fluorescence micrograph of stable transgenic lines of F. vesca expressing pDR5:DryasNIN treated under control conditions (+N+P) for four weeks on plates (top, G), and a corresponding micrograph of the transformation marker mCherry (bottom, G′). FIG. 17H shows a stereo-fluorescence micrograph of stable transgenic lines of F. vesca expressing pDR5:DryasNIN, treated with exogenous auxin (+N+P+NAA) for four weeks on plates (top, H), and a corresponding micrograph of the transformation marker mCherry (bottom, H′). Numerous nodule-like structures are visible, often losing spatial distribution. FIG. 17I shows a stereo-fluorescence micrograph of stable transgenic lines of F. vesca expressing pDR5:DryasNIN treated under nitrogen deficient conditions (−N+P) for four weeks on plates (top, I), and a corresponding micrograph of the transformation marker mCherry (bottom, I′). FIG. 17J shows a stereo-fluorescence micrograph of stable transgenic lines of F. vesca expressing pDR5:DryasNIN, treated under nitrogen deficient conditions with exogenous auxin (−N+P+NAA) for four weeks on plates (top, J), and a corresponding micrograph of the transformation marker mCherry (bottom, J′). Numerous nodule-like structures are visible, often losing spatial distribution. FIG. 17K shows a stereo-fluorescence micrograph of stable transgenic lines of F. vesca expressing pDR5:DryasNIN treated under phosphate deficient conditions (+N−P) for four weeks on plates (top, K), and a corresponding micrograph of the transformation marker mCherry (bottom, K′). FIG. 17L shows a stereo-fluorescence micrograph of stable transgenic lines of F. vesca expressing pDR5:DryasNIN, treated under phosphate deficient conditions with exogenous auxin (+N−P+NAA) for four weeks on plates (top, L), and a corresponding micrograph of the transformation marker mCherry (bottom, L′). Numerous nodule-like structures are visible, often losing spatial distribution. FIG. 17M shows boxplots of primordia density (number of primordia/root length) for two independent control lines (first and second sets of six boxplots) and three independent pDR5:DryasNIN lines (third through fifth sets of six boxplots). Each set of six boxplots includes, from left to right, control conditions (+N+P), nitrogen deficient (_N+P), phosphate deficient (+N_P), exogenous auxin (+N+P+NAA), nitrogen deficient with exogenous auxin (_N+P+NAA), and phosphate deficient with exogenous auxin (+N_P+NAA). The X-axis indicates the treatment; the Y-axis indicates the primordia density (primordia/root length in cm). Two way ANOVA followed by Tukey-Kramer pairwise comparison was used to calculate significant difference. Significant interactions are represented as single letter code where different codes represent significant differences. FIG. 17N shows boxplots of lateral root number for two independent control lines (first and second boxplots of each set of five) and three independent pDR5:DryasNIN lines (third through fifth boxplots of each set of five), under the following conditions from left to right: control conditions (+N+P), nitrogen deficient (_N+P), phosphate deficient (+N_P), exogenous auxin (+N+P+NAA), nitrogen deficient with exogenous auxin (_N+P+NAA), and phosphate deficient with exogenous auxin (+N_P+NAA). The X-axis indicates the treatment; the Y-axis indicates the lateral root number. Two way ANOVA followed by Tukey-Kramer pairwise comparison was used to calculate significant difference. Significant interactions are represented as single letter code where different codes represent significant differences. FIG. 17O shows boxplots of lateral root density (number of lateral roots/root length) for two independent control lines (first and second boxplots of each set of five) and three independent pDR5:DryasNIN lines (third through fifth boxplots of each set of five), under the following conditions from left to right: control conditions (+N+P), nitrogen deficient (_N+P), phosphate deficient (+N_P), exogenous auxin (+N+P+NAA), nitrogen deficient with exogenous auxin (_N+P+NAA), and phosphate deficient with exogenous auxin (+N_P+NAA). The X-axis indicates the treatment; the Y-axis indicates the lateral root density (lateral roots/root length in cm). Two way ANOVA followed by Tukey-Kramer pairwise comparison was used to calculate significant difference. Significant interactions are represented as single letter code where different codes represent significant differences.

[0077] FIGS. 18A-18S show ultrastructure analysis of the nodule-like structures (NLS), indicating the presence of multiple vascular bundles. FIG. 18A shows a stereo-fluorescence micrograph of F. vesca roots expressing pDR5:GUS (control) treated under control conditions (+N+P) for four weeks on plates followed by clearing with 5% hypochlorite solution. The scale bar indicates 500 μm. FIG. 18B shows a stereo-fluorescence micrograph of F. vesca roots expressing pDR5:GUS (control) treated with exogenous auxin (+N+P+NAA) for four weeks on plates followed by clearing with 5% hypochlorite solution, (left, B), and the same structure under higher magnification (right, B′). The scale bar indicates 500 μm. FIG. 18C shows a section stained with Toluidine blue of F. vesca roots expressing pDR5:GUS (control) treated with exogenous auxin (+N+P+NAA) for four weeks on plates followed by clearing with 5% hypochlorite solution. The scale bar indicates 250 μm. FIG. 18D shows a stereo-fluorescence micrograph of F. vesca roots expressing pDR5:GUS (control) treated under nitrogen deficient conditions (−N+P) for four weeks on plates followed by clearing with 5% hypochlorite solution. The scale bar indicates 500 μm. FIG. 18E shows a stereo-fluorescence micrograph of F. vesca roots expressing pDR5:GUS (control) treated under nitrogen deficient conditions with exogenous auxin (−N+P+NAA) for four weeks on plates followed by clearing with 5% hypochlorite solution, (left, E), and the same structure under higher magnification (right, E′). The scale bar indicates 500 μm. FIG. 18F shows a section stained with Toluidine blue of F. vesca roots expressing pDR5:GUS (control) treated under nitrogen deficient conditions with exogenous auxin (−N+P+NAA) for four weeks on plates followed by clearing with 5% hypochlorite solution. The scale bar indicates 250 μm. FIG. 18G shows a stereo-fluorescence micrograph of F. vesca roots expressing pDR5:GUS (control) treated under phosphate deficient conditions (+N−P) for four weeks on plates followed by clearing with 5% hypochlorite solution. The scale bar indicates 500 μm. FIG. 18H shows a stereo-fluorescence micrograph of F. vesca roots expressing pDR5:GUS (control) treated under phosphate deficient conditions with exogenous auxin (+N−P+NAA) for four weeks on plates followed by clearing with 5% hypochlorite solution, (left, H), and the same structure under higher magnification (right, H′). The scale bar indicates 500 μm. FIG. 18I shows a section stained with Toluidine blue of F. vesca roots expressing pDR5:GUS (control) treated under phosphate deficient conditions with exogenous auxin (+N−P+NAA) for four weeks on plates followed by clearing with 5% hypochlorite solution. The scale bar indicates 250 μm. FIG. 15J shows a stereo-fluorescence micrograph of F. vesca roots expressing pDR5:DryasNIN treated under control conditions (+N+P) for four weeks on plates followed by clearing with 5% hypochlorite solution. The scale bar indicates 500 μm. FIG. 18K shows a stereo-fluorescence micrograph of F. vesca roots expressing pDR5:DryasNIN treated with exogenous auxin (+N+P+NAA) for four weeks on plates followed by clearing with 5% hypochlorite solution, (left, K), and the same structure under higher magnification (right, K′). The scale bar indicates 500 μm. FIG. 18L shows a section stained with Toluidine blue of F. vesca roots expressing pDR5:DryasNIN treated with exogenous auxin (+N+P+NAA) for four weeks on plates followed by clearing with 5% hypochlorite solution. Significant presence of peripheral and multiple vascular bundles is visible. The scale bar indicates 250 μm. FIG. 18M shows a stereo-fluorescence micrograph of F. vesca roots expressing pDR5:DryasNIN treated under nitrogen deficient conditions (−N+P) for four weeks on plates followed by clearing with 5% hypochlorite solution. The scale bar indicates 500 μm. FIG. 18N shows a stereo-fluorescence micrograph of F. vesca roots expressing pDR5:DryasNIN treated under nitrogen deficient conditions with exogenous auxin (−N+P+NAA) for four weeks on plates followed by clearing with 5% hypochlorite solution, (left, N), and the same structure under higher magnification (right, N′). The scale bar indicates 500 μm. FIG. 18O shows a section stained with Toluidine blue of F. vesca roots expressing pDR5:DryasNIN treated under nitrogen deficient conditions with exogenous auxin (−N+P+NAA) for four weeks on plates followed by clearing with 5% hypochlorite solution. Significant presence of peripheral and multiple vascular bundles is visible. The scale bar indicates 250 μm. FIG. 18P shows a stereo-fluorescence micrograph of F. vesca roots expressing pDR5:DryasNIN treated under phosphate deficient conditions (+N−P) for four weeks on plates followed by clearing with 5% hypochlorite solution. The scale bar indicates 500 μm. FIG. 18Q shows a stereo-fluorescence micrograph of F. vesca roots expressing pDR5:DryasNIN treated under phosphate deficient conditions with exogenous auxin (+N−P+NAA) for four weeks on plates followed by clearing with 5% hypochlorite solution, (left, Q), and the same structure under higher magnification (right, Q′). The scale bar indicates 500 μm. FIG. 18R shows a section stained with Toluidine blue of F. vesca roots expressing pDR5:DryasNIN treated under phosphate deficient conditions with exogenous auxin (+N−P+NAA) for four weeks on plates followed by clearing with 5% hypochlorite solution. Significant presence of peripheral and multiple vascular bundles is visible. The scale bar indicates 250 μm. FIG. 18S shows boxplots of primordial size for two independent control lines (first and second sets of five boxplots) and three independent pDR5:DryasNIN lines (third through fifth sets of five boxplots), under the following conditions from top to bottom: phosphate deficient with exogenous auxin (+N_P+NAA), nitrogen deficient with exogenous auxin (_N+P+NAA), exogenous auxin (+N+P+NAA), phosphate deficient (+N_P), nitrogen deficient (_N+P), and control conditions (+N+P). The X-axis indicates the treatment; the Y-axis indicates primordia area in μm. Two way ANOVA followed by Tukey-Kramer pairwise comparison was used to calculate significant difference. Significant interactions are represented as single letter code where different codes represent significant differences.

[0078] FIGS. 19A-19B show that pDR5:DryasNIN in strawberry induces nodule like structures associated with a significant increase in DryasNIN expression. FIG. 19A shows box plots of primordia area in m for control strawberry plants (‘Control’) compared to strawberry plants expressing pDR5:DryasNIN (‘pDR5:DdNIN’), grown under the following conditions from left to right: +N+P, −N+P, +N+P+NAA, and −N+P+NAA. Statistical significance between the observations is calculated using two-way ANOVA followed by Tukey-Kramer pairwise comparison test, and significant interactions are represented as single letter codes, where different codes represent significant differences. Dots of different colors represent independent lines; the data involves 3 biological replicates and error bars represent standard error of the mean. FIG. 19B shows box plots of relative expression of DryasNIN for control strawberry plants (‘Control’) compared to strawberry plants expressing pDR5:DryasNIN (‘pDR5:DdNIN’), grown under the following conditions from left to right: +N+P, −N+P, +N+P+NAA, and −N+P+NAA. Statistical significance between the observations is calculated using two-way ANOVA followed by Tukey-Kramer pairwise comparison test, and significant interactions are represented as single letter codes, where different codes represent significant differences. Dots of different shades represent independent lines; the data involves 3 biological replicates and error bars represent standard error of the mean.

[0079] FIGS. 20A-20C show RNAseq analysis of pDR5:DryasNIN strawberry lines, indicating significant number of differentially expressed genes post NAA (auxin) treatment. FIG. 20A shows volcano plots comparing RNAseq results from strawberry roots transformed with pDR5:DryasNIN and control strawberry lines grown under the indicated conditions. From top to bottom, left to right, the conditions are: +N+P, −N+P, +N+P+NAA, and −N+P+NAA. The x-axis indicates the change in expression in log₂(fold change); the y-axis indicates the level of significance as −log₁₀(adjusted p-value). Vertical dashed lines represent differentially expressed gene (DEG) thresholds (|log₂(FC)|>1.5; adj. p-value<=0.05). DEGs are indicated in darker color, with upregulated DEGs shown in red to the right of the vertical lines and downregulated genes shown in blue to the left of the downregulated lines. The number of DEGs in each direction is indicated in parentheses. FIG. 20B shows an UpSet plot of differentially expressed genes in strawberry roots transformed with pDR5:DryasNIN compared to control strawberry lines under the indicated conditions. From top to bottom, the conditions are +N+P+NAA, −N+P+NAA, −N+P, and +N+P. Bar charts represent the size of the DEG sets in each condition (lateral bar charts) and of the intersecting sets (main bar chart). Intersecting sets are shown in a matrix with the rows corresponding to the conditions and columns representing the intersection between the conditions. Intersecting conditions are connected by a solid line. FIG. 20C shows a network plot of KEGG biosynthesis of secondary metabolites indicating specific sets of pathways that are differentially affected under auxin (NAA) treatment. The colors of nodes and edges represent different functional categories. Pathways containing DEG enzymes are indicated in bold nodes and edges. The specific DEG enzyme in each pathway is indicated by a black solid line over the edges. Up-pointing triangles indicate upregulated genes, and down-pointing triangles indicate downregulated genes; red pathways and triangles indicate genes differentially expressed under −N+P+NAA conditions, and blue pathways and triangles indicate genes differentially expressed under +N+P+NAA conditions. A selection of metabolic pathways are labeled and enclosed within boxes.

[0080] FIGS. 21A-21E show RNAseq analysis of Medicago truncatula under different conditions. FIG. 21A shows a volcano plot of a mycorrhization RNAseq dataset (Mock vs Myc). The x-axis shows the expression change in log₂(fold change), and the y-axis shows the significance level as −log₁₀(adjusted P-value). Genes that are downregulated are shown to the left of the dotted vertical lines; genes that are upregulated are shown to the right of the dotted vertical lines. FIG. 21B shows a volcano plot of a lateral root development RNAseq dataset. The x-axis shows the expression change in log₂(fold change), and the y-axis shows the significance level as −log₁₀(adjusted P-value). Genes that are downregulated are shown to the left of the dotted vertical lines; genes that are upregulated are shown to the right of the dotted vertical lines. FIG. 21C shows a volcano plot of an S. meliloti nodulation RNAseq dataset. The x-axis shows the expression change in log₂(fold change), and the y-axis shows the significance level as −log₁₀(adjusted P-value). Genes that are downregulated are shown to the left of the dotted vertical lines; genes that are upregulated are shown to the right of the dotted vertical lines. FIG. 21D shows a volcano plot of a NIN overexpression RNAseq dataset. The x-axis shows the expression change in log₂(fold change), and the y-axis shows the significance level as −log₁₀(adjusted P-value). Genes that are downregulated are shown to the left of the dotted vertical lines; genes that are upregulated are shown to the right of the dotted vertical lines. FIG. 21E shows a volcano plot of a spd1 (spontaneous nodule development 1) susceptible zone RNAseq dataset. The x-axis shows the expression change in log₂(fold change), and the y-axis shows the significance level as −log₁₀(adjusted P-value). Genes that are downregulated are shown to the left of the dotted vertical lines; genes that are upregulated are shown to the right of the dotted vertical lines. For FIGS. 21A-21E vertical dashed lines represent differentially expressed gene (DEG) thresholds (|log 2(FC)|>1.5; adj. p-value<=0.05).

[0081] FIGS. 22A-22B show that gene set enrichment analysis indicates specific sets of pathways that are differentially affected in M. truncatula throughout mycorrhization and nodule development. FIG. 22A shows network plots of KEGG biosynthesis of secondary metabolites for five different RNAseq datasets—from left to right, Mock vs Myc 27 days after infection, lateral root development 72 hours post transfer, spot inoculation with S. meliloti after 24 hours, NIN overexpression, and spd1 (spontaneous nodule development) susceptible zone. Differentially expressed genes in the same pathway are joined by solid lines. The colors of nodes and edges represent different functional categories. Pathways containing DEG enzymes are indicated in bold nodes and edges. The specific DEG enzyme in each pathway is indicated by a black solid line over the edges. FIG. 22B shows a table of pathways of genes differentially expressed in M. truncatula mycorrhization and nodulation RNAseq datasets and strawberry nodule-like structure RNAseq datasets (+N+P+NAA and −N+P+NAA). Columns indicate the pathways; from left to right: AA, terpenoid backbone, monolignol biosynthesis, glavanone, gibberelin, B-carotene, castasterone, abscisic acid, sterol biosynthesis, jasmonic acid biosynthesis, riboflavin, and heme biosynthesis. Rows indicate RNAseq datasets: from top to bottom: lateral root development, AMF, spot inoculation with S. meliloti, spd1 (spontaneous nodule development 1) susceptible zone, NIN overexpression, F. vesca pDR5::DryasNIN +N+P+NAA, and F. vesca pDR5::DryasNIN −N+P+NAA.

[0082] FIGS. 23A-23F show differential expression of pDR5:GUS in barley STARTS lines post auxin (NAA) treatment. FIG. 23A shows a micrograph of barley roots of the control line before treatment. The scale bar=500 μm. FIG. 23B shows micrographs of barley roots transformed with pOsUBI-GUS (intronless) before treatment. The panel on the right (B′; scale bar=250 μm) shows the boxed region from the panel on the left (B; scale bar=500 μm) with higher magnification. FIG. 23C shows micrographs of barley roots transformed with pDR5-GUS (intronless) before treatment. The panel on the right (C′; scale bar=250 μm) shows the boxed region from the panel on the left (C; scale bar=500 μm) with higher magnification. FIG. 23D shows a micrograph of barley roots of the control line 3 weeks post treatment with 100 μM NAA. The scale bar=500 μm. FIG. 23E shows micrographs of barley roots transformed with pOsUBI-GUS (intronless) 3 weeks post treatment with 100 μM NAA. The panel on the right (E′; scale bar=250 μm) shows the boxed region from the panel on the left (E; scale bar=500 μm) with higher magnification. FIG. 23F shows micrographs of barley roots transformed with pDR5-GUS (intronless) 3 weeks post treatment with 100 μM NAA. The panel on the right (F′; scale bar=250 μm) shows the boxed region from the panel on the left (F; scale bar=500 μm) with higher magnification.

[0083] FIGS. 24A-24J show differential expression of pDR5:NLS-eGFP in barley STARTS lines post auxin (2,4D; 2,4-Dichlorophenoxyacetic acid) treatment. FIG. 24A shows CLSM (confocal laser scanning microscope) micrographs of a barley root transformed with pOsUBI::GUS under control conditions. Panel A1 shows the root on a GFP channel; Panel A2 shows the root on an mCherry channel; Panel A3 shows the root on a transmitted light channel. The scale bar=100 μm. FIG. 24B shows CLSM micrographs of a barley root transformed with pOsUBI::GUS after treatment with auxin (50 μM 2,4D). Panel B1 shows the root on a GFP channel; Panel B2 shows the root on an mCherry channel; Panel B3 shows the root on a transmitted light channel. The scale bar=100 μm. FIG. 24C shows CLSM micrographs of a barley root transformed with pOsUBI::NLS-eGFP under control conditions. Panel C1 shows the root on a GFP channel; Panel C2 shows the root on an mCherry channel; Panel C3 shows the root on a transmitted light channel. The scale bar=10 μm. FIG. 24D shows CLSM micrographs of a barley root transformed with pOsUBI::NLS-eGFP after treatment with auxin (50M 2,4D). Panel D1 shows the root on a GFP channel; Panel D2 shows the root on an mCherry channel; Panel D3 shows the root on a transmitted light channel. The scale bar=10 μm. FIG. 24E shows CLSM micrographs of a barley root transformed with pOsUBI::NLS-eGFP under control conditions. Panel E1 shows the root on a GFP channel; Panel E2 shows the root on an mCherry channel; Panel E3 shows the root on a transmitted light channel. The scale bar=10 μm. FIG. 24F shows CLSM micrographs of a barley root transformed with pOsUBI::NLS-eGFP after treatment with auxin (50 μM 2,4D). Panel F1 shows the root on a GFP channel; Panel F2 shows the root on an mCherry channel; Panel F3 shows the root on a transmitted light channel. The scale bar=10 μm. FIG. 24G shows CLSM micrographs of a barley root transformed with pDR5::NLS-eGFP under control conditions. Panel G1 shows the root on a GFP channel; Panel G2 shows the root on an mCherry channel; Panel G3 shows the root on a transmitted light channel. The scale bar=100 μm. FIG. 24H shows CLSM micrographs of a barley root transformed with pDR5::NLS-eGFP after treatment with auxin (50M 2,4D). Panel H1 shows the root on a GFP channel; Panel H2 shows the root on an mCherry channel; Panel H3 shows the root on a transmitted light channel. The scale bar=100 μm. FIG. 24I shows CLSM micrographs of a barley root transformed with pDR5::NLS-eGFP under control conditions. Panel I1 shows the root on a GFP channel; Panel 12 shows the root on an mCherry channel; Panel 13 shows the root on a transmitted light channel. The scale bar=10 μm. FIG. 24J shows CLSM micrographs of a barley root transformed with pDR5::NLS-eGFP after treatment with auxin (50 μM 2,4D). Panel J1 shows the root on a GFP channel; Panel J2 shows the root on an mCherry channel; Panel J3 shows the root on a transmitted light channel. The scale bar=10 μm.

[0084] FIGS. 25A-25O shows that pDR5:DryasNIN induces nodule-like structures in barley with auxin (NAA) treatment. FIG. 25A shows a stereo-fluorescence micrograph of wildtype barley roots under control (+N+P) conditions. The scale bar indicates 500 μm. FIG. 25B shows micrographs of wildtype barley with auxin treatment, at lower (panel B) and higher (panel B′) magnification. The scale bar indicates 500 μm. FIG. 25C shows ultrastructure analysis of nodule sections of wildtype barley stained with toluidine blue three weeks after treatment under control conditions with exogenous auxin (+N+P+NAA). The scale bar indicates 250 μm. FIG. 25D shows a micrograph of wildtype barley under nitrogen deficient conditions. The scale bar indicates 500 μm. FIG. 25E shows micrographs of wildtype barley under nitrogen deficient conditions with auxin treatment, at lower (panel E) and higher (panel E′) magnification. The scale bar indicates 500 μm. FIG. 25F shows ultrastructure analysis of nodule sections of wildtype barley stained with toluidine blue three weeks after treatment under nitrogen deficient conditions with exogenous auxin (−N+P+NAA). The scale bar indicates 250 μm. FIG. 25G shows a stereo-fluorescence micrograph of T1 barley roots transformed with pDR5-DryasNIN under control (+N+P) conditions. The scale bar indicates 500 μm. FIG. 25H shows micrographs of T1 barley roots expressing pDR5:DryasNIN under conditions with auxin treatment (+N+P+NAA), at lower (panel H) and higher (panel H′) magnification. The scale bar indicates 500 μm. FIG. 25I shows ultrastructure analysis of nodule sections of pDR5:DryasNIN barley stained with toluidine blue three weeks after treatment under control conditions with exogenous auxin (+N+P+NAA), at lower (panel I) and higher (panel I′) magnification. The scale bar indicates 250 μm. FIG. 25J shows a stereo-fluorescence micrograph of TO barley roots transformed with pDR5-DryasNIN under nitrogen deficient (−N+P) conditions. The scale bar indicates 500 μm. FIG. 25K shows micrographs of TO barley roots expressing pDR5:DryasNIN under nitrogen deficient conditions with auxin treatment (−N+P+NAA), at lower (panel K) and higher (panel K′) magnification. The scale bar indicates 500 μm. FIG. 25L shows ultrastructure analysis of nodule sections of pDR5:DryasNIN TO barley stained with toluidine blue three weeks after treatment under nitrogen deficient conditions with exogenous auxin (−N+P+NAA), at lower (panel L) and higher (panel L′) magnification. The scale bar indicates 250 μm. FIG. 25M shows a stereo-fluorescence micrograph of T1 barley roots transformed with pDR5-DryasNIN under nitrogen deficient (−N+P) conditions. The scale bar indicates 500 μm. FIG. 25N shows micrographs of T1 barley roots expressing pDR5:DryasNIN under nitrogen deficient conditions with auxin treatment (−N+P+NAA), at lower (panel N) and higher (panel N′) magnification. The scale bar indicates 500 μm. FIG. 25O shows ultrastructure analysis of nodule sections of pDR5:DryasNIN T1 barley stained with toluidine blue three weeks after treatment under nitrogen deficient conditions with exogenous auxin (−N+P+NAA), at lower (panel O) and higher (panel O′) magnification. The scale bar indicates 250 μm.

[0085] FIG. 26 shows a sequence alignment of the RWP-RK domain of members of the NIN and NLP family of proteins. The sequences from top to bottom are: M. truncatula NIN (SEQ ID NO: 554), Manihot esculenta NIN (SEQ ID NO: 571), Glycine max NIN (SEQ ID NO: 575), Datisca glomerata NINs (SEQ ID NO: 578, 579), Glycine max NIN/NLP1 orthogroup protein (SEQ ID NO: 62), Manihot esculenta NIN/NLP1 orthogroup protein (SEQ ID NO: 102), Medicago truncatula NIN/NLP1 orthogroup protein (SEQ ID NO: 109), Sorghum NIN/NLP1 orthogroup proteins (SEQ ID NOs: 183, 184), Zea mays NIN/NLP1 orthogroup proteins (SEQ ID NOs: 214, 220), Glycine max NLP2-3 orthogroup protein (SEQ ID NO: 312), Manihot esculenta NLP2-3 orthogroup protein (SEQ ID NO: 333), Medicago truncatula NLP2-3 orthogroup protein (SEQ ID NO: 336), Sorghum NLP2-3 orthogroup protein (SEQ ID NO: 360), Glycine max NLP4 orthogroup protein (SEQ ID NO: 438), Manihot esculenta NLP4 orthogroup protein (SEQ ID NO: 456), Medicago truncatula NLP4 orthogroup protein (SEQ ID NO: 460), Sorghum NLP4 orthogroup protein (SEQ ID NO: 491), and Zea mays NLP4 orthogroup protein (SEQ ID NO: 513). Positions that are 100% conserved across the alignment are indicated by asterisks (*); positions where 100% of residues are biochemically very similar are indicated by a colon (:); positions where 100% of residues are biochemically similar are indicated by a period (.).

### DETAILED DESCRIPTION

[0086] The following description sets forth exemplary methods, parameters, and the like. It should be recognized, however, that such description is not intended as a limitation on the scope of the present disclosure but is instead provided as a description of exemplary embodiments.

### Genetically Modified Plants and Related Methods

[0087] In certain embodiments, the plant part may be a seed, pod, fruit, leaf, flower, stem, root, any part of the foregoing or a cell thereof, or a non-regenerable part or cell of a genetically modified plant part. As used in this context, a “non-regenerable” part or cell of a genetically modified plant or part thereof is a part or cell that itself cannot be induced to form a whole plant or cannot be induced to form a whole plant capable of sexual and/or asexual reproduction. In certain embodiments, the non-regenerable part or cell of the plant part is a part of a transgenic seed, pod, fruit, leaf, flower, stem or root or is a cell thereof.

[0088] Processed plant products that contain a detectable amount of a nucleotide segment, expressed RNA, and/or protein comprising a genetic modification disclosed herein are also provided. Such processed products include, but are not limited to, plant biomass, oil, meal, animal feed, flour, flakes, bran, lint, hulls, and processed seed. The processed product may be non-regenerable. The plant product can comprise commodity or other products of commerce derived from a transgenic plant or transgenic plant part, where the commodity or other products can be tracked through commerce by detecting a nucleotide segment, expressed RNA, and/or protein that comprises distinguishing portions of a genetic modification disclosed herein.

[0089] A control as described herein can be a control sample or a reference sample from a wild-type, an azygous, or a null-segregant plant, species, or sample or from populations thereof. A reference value can be used in place of a control or reference sample, which was previously obtained from a wild-type, azygous, or null-segregant plant, species, or sample or from populations thereof or a group of a wild-type, azygous, or null-segregant plant, species, or sample. A control sample or a reference sample can also be a sample with a known amount of a detectable composition or a spiked sample.

### Plant Breeding Methods

[0090] Plant breeding begins with the analysis of the current germplasm, the definition of problems and weaknesses of the current germplasm, the establishment of program goals, and the definition of specific breeding objectives. The next step is the selection of germplasm that possess the traits to meet the program goals. The selected germplasm is crossed in order to recombine the desired traits and through selection, varieties or parent lines are developed. The goal is to combine in a single variety or hybrid an improved combination of desirable traits from the parental germplasm. These important traits may include higher yield, field performance, improved fruit and agronomic quality, resistance to biological stresses, such as diseases and pests, and tolerance to environmental stresses, such as drought and heat.

[0091] Each breeding program should include a periodic, objective evaluation of the efficiency of the breeding procedure. Evaluation criteria vary depending on the goal and objectives, but should include gain from selection per year based on comparisons to an appropriate standard, overall value of the advanced breeding lines, and number of successful cultivars produced per unit of input (e.g., per year, per dollar expended, etc.). Promising advanced breeding lines are thoroughly tested and compared to appropriate standards in environments representative of the commercial target area(s) for three years at least. The best lines are candidates for new commercial cultivars; those still deficient in a few traits are used as parents to produce new populations for further selection. These processes, which lead to the final step of marketing and distribution, usually take five to ten years from the time the first cross or selection is made.

[0092] The choice of breeding or selection methods depends on the mode of plant reproduction, the heritability of the trait(s) being improved, and the type of cultivar used commercially (e.g., F₁ hybrid cultivar, inbred cultivar, etc.). For highly heritable traits, a choice of superior individual plants evaluated at a single location will be effective, whereas for traits with low heritability, selection should be based on mean values obtained from replicated evaluations of families of related plants. The complexity of inheritance also influences the choice of the breeding method. Backcross breeding is used to transfer one or a few genes for a highly heritable trait into a desirable cultivar (e.g., for breeding disease-resistant cultivars), while recurrent selection techniques are used for quantitatively inherited traits controlled by numerous genes, various recurrent selection techniques are used. Commonly used selection methods include pedigree selection, modified pedigree selection, mass selection, and recurrent selection.

[0093] Pedigree selection is generally used for the improvement of self-pollinating crops or inbred lines of cross-pollinating crops. Two parents which possess favorable, complementary traits are crossed to produce an F₁. An F₂ population is produced by selfing one or several F₁s or by intercrossing two F₁s (sib mating). Selection of the best individuals is usually begun in the F₂ population; then, beginning in the F₃, the best individuals in the best families are selected. Replicated testing of families, or hybrid combinations involving individuals of these families, often follows in the F₄ generation to improve the effectiveness of selection for traits with low heritability. At an advanced stage of inbreeding (i.e., F₆ and F₇), the best lines or mixtures of phenotypically similar lines are tested for potential release as new cultivars.

[0094] Mass and recurrent selections can be used to improve populations of either self- or cross-pollinating crops. A genetically variable population of heterozygous individuals is either identified or created by intercrossing several different parents. The best plants are selected based on individual superiority, outstanding progeny, or excellent combining ability. The selected plants are intercrossed to produce a new population in which further cycles of selection are continued.

[0095] Backcross breeding (i.e., recurrent selection) may be used to transfer genes for a simply inherited, highly heritable trait into a desirable homozygous cultivar or line that is the recurrent parent. The source of the trait to be transferred is called the donor parent. The resulting plant is expected to have the attributes of the recurrent parent (e.g., cultivar) and the desirable trait transferred from the donor parent. After the initial cross, individuals possessing the phenotype of the donor parent are selected and repeatedly crossed (backcrossed) to the recurrent parent. The resulting plant is expected to have the attributes of the recurrent parent (e.g., cultivar) and the desirable trait transferred from the donor parent.

[0096] The single-seed descent procedure in the strict sense refers to planting a segregating population, harvesting a sample of one seed per plant, and using the one-seed sample to plant the next generation. When the population has been advanced from the F₂ to the desired level of inbreeding, the plants from which lines are derived will each trace to different F₂ individuals. The number of plants in a population declines each generation due to failure of some seeds to germinate or some plants to produce at least one seed. As a result, not all of the F₂ plants originally sampled in the population will be represented by a progeny when generation advance is completed.

[0097] In addition to phenotypic observations, the genotype of a plant can also be examined. There are many laboratory-based techniques available for the analysis, comparison and characterization of plant genotype; among these are Isozyme Electrophoresis, Restriction Fragment Length Polymorphisms (RFLPs), Randomly Amplified Polymorphic DNAs (RAPDs), Arbitrarily Primed Polymerase Chain Reaction (AP-PCR), DNA Amplification Fingerprinting (DAF), Sequence Characterized Amplified Regions (SCARs), Amplified Fragment Length Polymorphisms (AFLPs), Simple Sequence Repeats (SSRs, which are also referred to as Microsatellites), Fluorescently Tagged Inter-simple Sequence Repeats (ISSRs), Single Nucleotide Polymorphisms (SNPs), Genotyping by Sequencing (GbS), and Next-generation Sequencing (NGS).

[0098] Molecular markers, or “markers”, can also be used during the breeding process for the selection of qualitative traits. For example, markers closely linked to alleles or markers containing sequences within the actual alleles of interest can be used to select plants that contain the alleles of interest. The use of markers in the selection process is often called genetic marker enhanced selection or marker-assisted selection. Methods of performing marker analysis are generally known to those of skill in the art.

[0099] Mutation breeding may also be used to introduce new traits into plant varieties. Mutations that occur spontaneously or are artificially induced can be useful sources of variability for a plant breeder. The goal of artificial mutagenesis is to increase the rate of mutation for a desired characteristic. Mutation rates can be increased by many different means including temperature, long-term seed storage, tissue culture conditions, radiation (such as X-rays, Gamma rays, neutrons, Beta radiation, or ultraviolet radiation), chemical mutagens (such as base analogs like 5-bromo-uracil), antibiotics, alkylating agents (such as sulfur mustards, nitrogen mustards, epoxides, ethyleneamines, sulfates, sulfonates, sulfones, or lactones), azide, hydroxylamine, nitrous acid or acridines. Once a desired trait is observed through mutagenesis the trait may then be incorporated into existing germplasm by traditional breeding techniques. Details of mutation breeding can be found in Principles of Cultivar Development: Theory and Technique, Walter Fehr (1991), Agronomy Books, 1 (https://lib.dr.iastate.edu/agron_books/1).

[0100] The production of double haploids can also be used for the development of homozygous lines in a breeding program. Double haploids are produced by the doubling of a set of chromosomes from a heterozygous plant to produce a completely homozygous individual. For example, see Wan, et al., Theor. Appl. Genet., 77:889-892, 1989.

[0101] Additional non-limiting examples of breeding methods that may be used include, without limitation, those found in Principles of Plant Breeding, John Wiley and Son, pp. 115-161 (1960); Principles of Cultivar Development: Theory and Technique, Walter Fehr (1991), Agronomy Books, 1 (https://lib[dot]dr[dot]iastate[dot]edu/agron_books/1), which are herewith incorporated by reference.

### Molecular Biological Methods to Produce Genetically Modified Plant Cells, Plant Parts, and Plants

[0102] Transformation and generation of genetically altered monocotyledonous and dicotyledonous plant cells is well known in the art. See, e.g., Weising, et al., Ann. Rev. Genet. 22:421-477 (1988); U.S. Pat. No. 5,679,558; Agrobacterium Protocols, ed: Gartland, Humana Press Inc. (1995); Wang, et al. Acta Hort. 461:401-408 (1998), and Broothaerts, et al. Nature 433:629-633 (2005). The choice of method varies with the type of plant to be transformed, the particular application, and/or the desired result. The appropriate transformation technique is readily chosen by the skilled practitioner.

[0103] Any methodology known in the art to delete, insert or otherwise modify the cellular DNA (e.g., genomic DNA and organelle DNA) can be used in practicing the compositions, methods, and processes disclosed herein. As an example, the CRISPR/Cas-9 system and related systems (e.g., TALEN, ZFN, ODN, etc.) may be used to insert a heterologous gene to a targeted site in the genomic DNA or substantially edit an endogenous gene to express the heterologous gene or to modify the promoter to increase or otherwise alter expression of an endogenous gene through, for example, removal of repressor binding sites or introduction of enhancer binding sites. For example, a disarmed Ti plasmid, containing a genetic construct for deletion or insertion of a target gene, in Agrobacterium tumefaciens can be used to transform a plant cell, and thereafter, a transformed plant can be regenerated from the transformed plant cell using procedures described in the art, for example, in EP 0116718, EP 0270822, PCT publication WO 84/02913 and published European Patent application (“EP”) 0242246. Ti-plasmid vectors each contain the gene between the border sequences, or at least located to the left of the right border sequence, of the T-DNA of the Ti-plasmid. Of course, other types of vectors can be used to transform the plant cell, using procedures such as direct gene transfer (as described, for example in EP 0233247), pollen mediated transformation (as described, for example in EP 0270356, PCT publication WO 85/01856, and U.S. Pat. No. 4,684,611), plant RNA virus-mediated transformation (as described, for example in EP 0 067 553 and U.S. Pat. No. 4,407,956), liposome-mediated transformation (as described, for example in U.S. Pat. No. 4,536,475), and other methods such as the methods for transforming certain lines of corn (e.g., U.S. Pat. No. 6,140,553; Fromm et al., Bio/Technology (1990) 8, 833-839); Gordon-Kamm et al., The Plant Cell, (1990) 2, 603-618), rice (Shimamoto et al., Nature, (1989) 338, 274-276; Datta et al., Bio/Technology, (1990) 8, 736-740), and the method for transforming monocots generally (PCT publication WO 92/09696). For cotton transformation, the method described in PCT patent publication WO 00/71733 can be used. For soybean transformation, reference is made to methods known in the art, e.g., Hinchee et al. (Bio/Technology, (1988) 6, 915) and Christou et al. (Trends Biotech, (1990) 8, 145) or the method of WO 00/42207.

[0104] Genetically altered plants of the present disclosure can be used in a conventional plant breeding scheme to produce more genetically altered plants with the same characteristics, or to introduce the genetic alteration(s) in other varieties of the same or related plant species. Seeds, which are obtained from the altered plants, preferably contain the genetic alteration(s) as a stable insert in chromosomal DNA or as modifications to an endogenous gene or promoter. Plants including the genetic alteration(s) in accordance with this disclosure include plants including, or derived from, root stocks of plants including the genetic alteration(s) of this disclosure, e.g., fruit trees or ornamental plants. Hence, any non-transgenic grafted plant parts inserted on a transformed plant or plant part are included in this disclosure.

[0105] Genetic alterations of the disclosure, including in an expression vector or expression cassette, which result in the expression of an introduced gene or altered expression of an endogenous gene will typically utilize a plant-expressible promoter. A ‘plant-expressible promoter’ as used herein refers to a promoter that ensures expression of the genetic alteration(s) of this disclosure in a plant cell. Examples of constitutive promoters that are often used in plant cells are the cauliflower mosaic (CaMV) 35S promoter (Kay et al. Science, 236, 4805, 1987), the minimal CaMV 35S promoter (Benfey & Chua, Science, (1990) 250, 959-966), various other derivatives of the CaMV 35S promoter, the figwort mosaic virus (FMV) promoter (Richins, et al., Nucleic Acids Res. (1987) 15:8451-8466), the maize ubiquitin promoter (Christensen & Quail, Transgenic Res, 5, 213-8, 1996), the polyubiquitin promoter (Ljubql, Maekawa et al. Mol Plant Microbe Interact. 21, 375-82, 2008), the vein mosaic cassava virus promoter (International Application WO 97/48819), and the Arabidopsis UBQ10 promoter, Norris et al. Plant Mol. Biol. 21, 895-906, 1993).

[0106] Additional examples of promoters directing constitutive expression in plants are known in the art and include: the strong constitutive 35S promoters (the “35S promoters”) of the cauliflower mosaic virus (CaMV), e.g., of isolates CM 1841 (Gardner et al., Nucleic Acids Res, (1981) 9, 2871-2887), CabbB S (Franck et al., Cell (1980) 21, 285-294) and CabbB JI (Hull and Howell, Virology, (1987) 86, 482-493); promoters from the ubiquitin family (e.g., the maize ubiquitin promoter of Christensen et al., Plant Mol Biol, (1992) 18, 675-689), the gos2 promoter (de Pater et al., The Plant J (1992) 2, 834-844), the emu promoter (Last et al., Theor Appl Genet, (1990) 81, 581-588), actin promoters such as the promoter described by An et al. (The Plant J, (1996) 10, 107), the rice actin promoter described by Zhang et al. (The Plant Cell, (1991) 3, 1155-1165); promoters of the figwort mosaic virus (FMV) (Richins, et al., Nucleic Acids Res. (1987) 15:8451-8466), promoters of the Cassava vein mosaic virus (WO 97/48819; Verdaguer et al., Plant Mol Biol, (1998) 37, 1055-1067), the pPLEX series of promoters from Subterranean Clover Stunt Virus (WO 96/06932, particularly the S4 or S7 promoter), an alcohol dehydrogenase promoter, e.g., pAdh1S (GenBank accession numbers X04049, X00581), and the TR1′ promoter and the TR2′ promoter (the “TR1′ promoter” and “TR2′ promoter”, respectively) which drive the expression of the F and 2′ genes, respectively, of the T DNA (Velten et al., EMBO J, (1984) 3, 2723-2730).

[0107] Alternatively, a plant-expressible promoter can be a tissue-specific promoter, i.e., a promoter directing a higher level of expression in some cells or tissues of the plant, e.g., in root epidermal cells or root cortex cells. In preferred embodiments, LysM receptor promoters will be used. Non-limiting examples include NFR1 promoters, NFR5 promoters, LYK3 promoters, NFP promoters, the Lotus japonicus NFR5 promoter (SEQ ID NO: 638), the Lotus japonicus NFR1 promoter (SEQ ID NO: 642), the Medicago truncatula NFP promoter (SEQ ID NO: 639), the Lotus japonicus CERK6 promoter (SEQ ID NO: 640), and the Medicago truncatula LYK3 promoter (SEQ ID NO: 641). In additional preferred embodiments, root specific promoters will be used. Non-limiting examples include the promoter of the maize allothioneine (De Framond et al, FEBS 290, 103.-106, 1991 Application EP 452269), the chitinase promoter (Samac et al. Plant Physiol 93, 907-914, 1990), the glutamine synthetase soybean root promoter (Hirel et al. Plant Mol. Biol. 20, 207-218, 1992), the RCC3 promoter (PCT Application WO 2009/016104), the rice antiquitine promoter (PCT Application WO 2007/076115), the LRR receptor kinase promoter (PCT application WO 02/46439), the maize ZRP2 promoter (U.S. Pat. No. 5,633,363), the tomato LeExt1 promoter (Bucher et al. Plant Physiol. 128, 911-923, 2002), and the Arabidopsis pCO2 promoter (Heidstra et al, Genes Dev. 18, 1964-1969, 2004). These plant promoters can be combined with enhancer elements, they can be combined with minimal promoter elements, or can comprise repeated elements to ensure the expression profile desired.

[0108] Examples of constitutive promoters that are often used in plant cells are the cauliflower mosaic (CaMV) 35S promoter (Kay et al. Science, 236, 4805, 1987), and various derivatives of the promoter, virus promoter vein mosaic cassava (International Application WO 97/48819), the maize ubiquitin promoter (Christensen & Quail, Transgenic Res, 5, 213-8, 1996), the polyubiquitin promoter (Ljubql, Maekawa et al. Mol Plant Microbe Interact. 21, 375-82, 2008), and the Arabidopsis UBQ10 promoter (Norris et al. Plant Mol. Biol. 21, 895-906, 1993).

[0109] In some embodiments, a plant-expressible promoter can be an inducible promoter, i.e. a promoter directing a higher level of expression in response to an environmental or external cue. In some embodiments, a plant-expressible promoter can be a plant promoter that is inducible upon exposure to a plant hormone, such as auxin. Examples of inducible promoters that can be used in plant cell are the DR5 promoter (pDR5) (Ulmasov et al. Plant Cell. 9(11), 1963-71, 1997); auxin-response elements E1 promoter fragment (AuxREs) in the soybean (Glycine max L.) (Liu Plant Physiol. 115:397-407, 1997); the auxin-responsive Arabidopsis GST6 promoter (also responsive to salicylic acid and hydrogen peroxide) (Chen Plant J. 10: 955-966, 1996); and the auxin-inducible parC promoter from tobacco (Sakai 37:906-913, 1996). In some embodiments, pDR5 is used. As disclosed herein, ectopic expression of NIN downstream to the synthetic DR5 promoter resulted in spontaneous organogenesis. The potential of the pDR5:NIN was demonstrated in non-nodulating species (e.g., strawberry and barley) where stable lines expressing the construct formed nodule-like structures (NLS) in the presence of exogenous auxin. pDR5 can be combined with other promoter elements as described herein, such as minimal promoter elements, enhancer, or repeated elements to ensure the desired expression profile.

[0110] In some embodiments, further genetic alterations to increase expression in plant cells can be utilized. For example, an intron at the 5′ end or 3′ end of an introduced gene, or in the coding sequence of the introduced gene, e.g., the hsp70 intron. Other such genetic elements can include, but are not limited to, promoter enhancer elements, duplicated or triplicated promoter regions, 5′ leader sequences different from another transgene or different from an endogenous (plant host) gene leader sequence, 3′ trailer sequences different from another transgene used in the same plant or different from an endogenous (plant host) trailer sequence.

[0111] An introduced gene of the present disclosure can be inserted in host cell DNA so that the inserted gene part is upstream (i.e., 5′) of suitable 3′ end transcription regulation signals (i.e., transcript formation and polyadenylation signals). This is preferably accomplished by inserting the gene in the plant cell genome (nuclear or chloroplast). Preferred polyadenylation and transcript formation signals include those of the nopaline synthase gene (Depicker et al., J. Molec Appl Gen, (1982) 1, 561-573), the octopine synthase gene (Gielen et al., EMBO J, (1984) 3:835-845), the SCSV or the Malic enzyme terminators (Schunmann et al., Plant Funct Biol, (2003) 30:453-460), and the T DNA gene 7 (Velten and Schell, Nucleic Acids Res, (1985) 13, 6981-6998), which act as 3′ untranslated DNA sequences in transformed plant cells. In some embodiments, one or more of the introduced genes are stably integrated into the nuclear genome. Stable integration is present when the nucleic acid sequence remains integrated into the nuclear genome and continues to be expressed (i.e., detectable mRNA transcript or protein is produced) throughout subsequent plant generations. Stable integration into the nuclear genome can be accomplished by any known method in the art (e.g., microparticle bombardment, Agrobacterium-mediated transformation, CRISPR/Cas9, electroporation of protoplasts, microinjection, etc.).

[0112] The term recombinant or modified nucleic acids refers to polynucleotides which are made by the combination of two otherwise separated segments of sequence accomplished by the artificial manipulation of isolated segments of polynucleotides by genetic engineering techniques or by chemical synthesis. In so doing one may join together polynucleotide segments of desired functions to generate a desired combination of functions.

[0113] As used herein, the term “overexpression” refers to increased expression (e.g., of mRNA, polypeptides, etc.) relative to expression in a wild type organism (e.g., plant) as a result of genetic modification and can refer to expression of heterologous genes at a sufficient level to achieve the desired result such as increased yield. In some embodiments, the increase in expression is a slight increase of about 10% more than expression in wild type. In some embodiments, the increase in expression is an increase of 50% or more (e.g., 60%, 70%, 80%, 100%, etc.) relative to expression in wild type. In some embodiments, an endogenous gene is upregulated. In some embodiments, an exogenous gene is upregulated by virtue of being expressed. Upregulation of a gene in plants can be achieved through any known method in the art, including but not limited to, the use of constitutive promoters with inducible response elements added, inducible promoters, high expression promoters (e.g., PsaD promoter) with inducible response elements added, enhancers, transcriptional and/or translational regulatory sequences, codon optimization, modified transcription factors, and/or mutant or modified genes that control expression of the gene to be upregulated in response to a stimulus such as cytokinin signaling.

[0114] Where a recombinant nucleic acid is intended for expression, cloning, or replication of a particular sequence, DNA constructs prepared for introduction into a host cell will typically include a replication system (e.g., vector) recognized by the host, including the intended DNA fragment encoding a desired polypeptide, and can also include transcription and translational initiation regulatory sequences operably linked to the polypeptide-encoding segment. Additionally, such constructs can include cellular localization signals (e.g., plasma membrane localization signals). In preferred embodiments, such DNA constructs are introduced into a host cell's genomic DNA, chloroplast DNA or mitochondrial DNA.

[0115] In some embodiments, a non-integrated expression system can be used to induce expression of one or more introduced genes. Expression systems (expression vectors) can include, for example, an origin of replication or autonomously replicating sequence (ARS) and expression control sequences, a promoter, an enhancer and necessary processing information sites, such as ribosome-binding sites, RNA splice sites, polyadenylation sites, transcriptional terminator sequences, and mRNA stabilizing sequences. Signal peptides can also be included where appropriate from secreted polypeptides of the same or related species, which allow the protein to cross and/or lodge in cell membranes, cell wall, or be secreted from the cell.

[0116] Selectable markers useful in practicing the methodologies disclosed herein can be positive selectable markers. Typically, positive selection refers to the case in which a genetically altered cell can survive in the presence of a toxic substance only if the recombinant polynucleotide of interest is present within the cell. Negative selectable markers and screenable markers are also well known in the art and are contemplated by the present disclosure. One of skill in the art will recognize that any relevant markers available can be utilized in practicing the compositions, methods, and processes disclosed herein.

[0117] Screening and molecular analysis of recombinant strains of the present disclosure can be performed utilizing nucleic acid hybridization techniques. Hybridization procedures are useful for identifying polynucleotides, such as those modified using the techniques described herein, with sufficient homology to the subject regulatory sequences to be useful as taught herein. The particular hybridization techniques are not essential to this disclosure. As improvements are made in hybridization techniques, they can be readily applied by one of skill in the art. Hybridization probes can be labeled with any appropriate label known to those of skill in the art. Hybridization conditions and washing conditions, for example temperature and salt concentration, can be altered to change the stringency of the detection threshold. See, e.g., Sambrook et al. (1989) vide infra or Ausubel et al. (1995) Current Protocols in Molecular Biology, John Wiley & Sons, NY, N.Y., for further guidance on hybridization conditions.

[0118] Additionally, screening and molecular analysis of genetically altered strains, as well as creation of desired isolated nucleic acids can be performed using Polymerase Chain Reaction (PCR). PCR is a repetitive, enzymatic, primed synthesis of a nucleic acid sequence. This procedure is well known and commonly used by those skilled in this art (see Mullis, U.S. Pat. Nos. 4,683,195, 4,683,202, and 4,800,159; Saiki et al. (1985) Science 230:1350-1354). PCR is based on the enzymatic amplification of a DNA fragment of interest that is flanked by two oligonucleotide primers that hybridize to opposite strands of the target sequence. The primers are oriented with the 3′ ends pointing towards each other. Repeated cycles of heat denaturation of the template, annealing of the primers to their complementary sequences, and extension of the annealed primers with a DNA polymerase result in the amplification of the segment defined by the 5′ ends of the PCR primers. Because the extension product of each primer can serve as a template for the other primer, each cycle essentially doubles the amount of DNA template produced in the previous cycle. This results in the exponential accumulation of the specific target fragment, up to several million-fold in a few hours. By using a thermostable DNA polymerase such as the Taq polymerase, which is isolated from the thermophilic bacterium Thermus aquaticus, the amplification process can be completely automated. Other enzymes which can be used are known to those skilled in the art.

[0119] Nucleic acids and proteins of the present disclosure can also encompass homologues of the specifically disclosed sequences. Homology (e.g., sequence identity) can be 50%-100%. In some instances, such homology is greater than 80%, greater than 85%, greater than 90%, or greater than 95%. The degree of homology or identity needed for any intended use of the sequence(s) is readily identified by one of skill in the art. As used herein percent sequence identity of two nucleic acids is determined using an algorithm known in the art, such as that disclosed by Karlin and Altschul (1990) Proc. Natl. Acad. Sci. USA 87:2264-2268, modified as in Karlin and Altschul (1993) Proc. Natl. Acad. Sci. USA 90:5873-5877. Such an algorithm is incorporated into the BLASTN, BLASTP, and BLASTX, programs of Altschul et al. (1990) J. Mol. Biol. 215:402-410. BLAST nucleotide searches are performed with the BLASTN program, score=100, wordlength=12, to obtain nucleotide sequences with the desired percent sequence identity. To obtain gapped alignments for comparison purposes, Gapped BLAST is used as described in Altschul et al. (1997) Nucl. Acids. Res. 25:3389-3402. When utilizing BLAST and Gapped BLAST programs, the default parameters of the respective programs (BLASTN and BLASTX) are used. See www.ncbi.nih.gov. One of skill in the art can readily determine in a sequence of interest where a position corresponding to amino acid or nucleic acid in a reference sequence occurs by aligning the sequence of interest with the reference sequence using the suitable BLAST program with the default settings (e.g., for BLASTP: Gap opening penalty: 11, Gap extension penalty: 1, Expectation value: 10, Word size: 3, Max scores: 25, Max alignments: 15, and Matrix: blosum62; and for BLASTN: Gap opening penalty: 5, Gap extension penalty:2, Nucleic match: 1, Nucleic mismatch-3, Expectation value: 10, Word size: 11, Max scores: 25, and Max alignments: 15).

[0120] Preferred host cells are plant cells. Recombinant host cells, in the present context, are those which have been genetically modified to contain an isolated nucleic molecule, contain one or more deleted or otherwise non-functional genes normally present and functional in the host cell, or contain one or more genes to produce at least one recombinant protein. The nucleic acid(s) encoding the protein(s) of the present disclosure can be introduced by any means known to the art which is appropriate for the particular type of cell, including without limitation, transformation, lipofection, electroporation or any other methodology known by those skilled in the art.

[0121] “Isolated”, “isolated DNA molecule” or an equivalent term or phrase is intended to mean that the DNA molecule or other moiety is one that is present alone or in combination with other compositions, but altered from or not within its natural environment. For example, nucleic acid elements such as a coding sequence, intron sequence, untranslated leader sequence, promoter sequence, transcriptional termination sequence, and the like, that are naturally found within the DNA of the genome of an organism are not considered to be “isolated” so long as the element is within the genome of the organism and at the location within the genome in which it is naturally found. However, each of these elements, and subparts of these elements, would be “isolated” from its natural setting within the scope of this disclosure so long as the element is not within the genome of the organism in which it is naturally found, the element is altered from its natural form, or the element is not at the location within the genome in which it is naturally found. Similarly, a nucleotide sequence encoding a protein or any naturally occurring variant of that protein would be an isolated nucleotide sequence so long as the nucleotide sequence was not within the DNA of the organism from which the sequence encoding the protein is naturally found in its natural location or if that nucleotide sequence was altered from its natural form. A synthetic nucleotide sequence encoding the amino acid sequence of the naturally occurring protein would be considered to be isolated for the purposes of this disclosure. For the purposes of this disclosure, any transgenic nucleotide sequence, i.e., the nucleotide sequence of the DNA inserted into the genome of the cells of a plant, alga, fungus, or bacterium, or present in an extrachromosomal vector, would be considered to be an isolated nucleotide sequence whether it is present within the plasmid or similar structure used to transform the cells, within the genome of the plant or bacterium, or present in detectable amounts in tissues, progeny, biological samples or commodity products derived from the plant or bacterium.

### NIN and NLP Proteins

[0122] NODULE INCEPTION (NIN) is a key regulatory transcription factor in nodulation, controlling nodule organogenesis, bacterial intracellular infection (e.g., rhizobial infection), and nodule functioning in legumes and nodulating non-legumes. NIN is part of a small gene family of NIN-LIKE PROTEINS (NLPs). Most NLP genes (including NIN orthologs in non-nodulating species) are constitutively expressed in root tissue. The encoded NLP proteins act as nitrate sensors, which upon high nitrate concentrations re-locate from the cytoplasm into the cell nucleus. In contrast, symbiotic NIN is transcriptionally induced specifically during root nodule symbiosis, and the encoded protein localizes to the cell nucleus independent of nitrate concentration. This difference underlines that the NIN protein gained essential adaptations; however, the signature of these adaptations remains unknown.

[0123] NIN and NLP proteins contain a RWP-RK domain and a Phox and Bem1 (PB1) domain (Mu and Luo (2019) Cellular and Molecular Life Sciences 76:3753-3764. Conservation of the RWP-RK domain is shown in FIG. 26. In some embodiments, the NIN protein or the NLP protein comprises an amino acid sequence with at least 80%, at least 85%, at least 90%, at least 91%, at least 92%, at least 93%, at least 94%, at least 95%, at least 96%, at least 97%, at least 98%, at least 99%, or 100% identity to SEQ ID NO: 649.

[0124] Exemplary NIN proteins include, but are not limited to, SEQ ID NOs: SEQ ID NO: 551, SEQ ID NO: 552, SEQ ID NO: 553, SEQ ID NO: 554, SEQ ID NO: 555, SEQ ID NO: 556, SEQ ID NO: 557, SEQ ID NO: 558, SEQ ID NO: 559, SEQ ID NO: 560, SEQ ID NO: 561, SEQ ID NO: 562, SEQ ID NO: 563, SEQ ID NO: 564, SEQ ID NO: 565, SEQ ID NO: 566, SEQ ID NO: 567, SEQ ID NO: 568, SEQ ID NO: 569, SEQ ID NO: 570, SEQ ID NO: 571, SEQ ID NO: 572, SEQ ID NO: 573, SEQ ID NO: 574, SEQ ID NO: 575, SEQ ID NO: 576, SEQ ID NO: 577, SEQ ID NO: 578, SEQ ID NO: 579, SEQ ID NO: 580, SEQ ID NO: 581, SEQ ID NO: 582, SEQ ID NO: 583, SEQ ID NO: 584, SEQ ID NO: 585, SEQ ID NO: 586, SEQ ID NO: 587, and SEQ ID NO: 588. In some embodiments, a genetically modified NIN protein has at least 70% sequence identity, at least 75% sequence identity, at least 80% sequence identity, at least 85% sequence identity, at least 90% sequence identity, at least 95% sequence identity, at least 96% sequence identity, at least 97% sequence identity, at least 98% sequence identity, or at least 99% sequence identity to an amino acid sequence selected from SEQ ID NO: 551, SEQ ID NO: 552, SEQ ID NO: 553, SEQ ID NO: 554, SEQ ID NO: 555, SEQ ID NO: 556, SEQ ID NO: 557, SEQ ID NO: 558, SEQ ID NO: 559, SEQ ID NO: 560, SEQ ID NO: 561, SEQ ID NO: 562, SEQ ID NO: 563, SEQ ID NO: 564, SEQ ID NO: 565, SEQ ID NO: 566, SEQ ID NO: 567, SEQ ID NO: 568, SEQ ID NO: 569, SEQ ID NO: 570, SEQ ID NO: 571, SEQ ID NO: 572, SEQ ID NO: 573, SEQ ID NO: 574, SEQ ID NO: 575, SEQ ID NO: 576, SEQ ID NO: 577, SEQ ID NO: 578, SEQ ID NO: 579, SEQ ID NO: 580, SEQ ID NO: 581, SEQ ID NO: 582, SEQ ID NO: 583, SEQ ID NO: 584, SEQ ID NO: 585, SEQ ID NO: 586, SEQ ID NO: 587, and SEQ ID NO: 588.

[0125] Exemplary NIN/NLP1 orthogroup proteins include, but are not limited to, SEQ ID NO: 1, SEQ ID NO: 2, SEQ ID NO: 3, SEQ ID NO: 4, SEQ ID NO: 5, SEQ ID NO: 6, SEQ ID NO: 8, SEQ ID NO: 9, SEQ ID NO: 10, SEQ ID NO: 11, SEQ ID NO: 12, SEQ ID NO: 13, SEQ ID NO: 14, SEQ ID NO: 15, SEQ ID NO: 16, SEQ ID NO: 17, SEQ ID NO: 18, SEQ ID NO: 19, SEQ ID NO: 20, SEQ ID NO: 21, SEQ ID NO: 22, SEQ ID NO: 23, SEQ ID NO: 24, SEQ ID NO: 25, SEQ ID NO: 26, SEQ ID NO: 27, SEQ ID NO: 28, SEQ ID NO: 29, SEQ ID NO: 30, SEQ ID NO: 31, SEQ ID NO: 32, SEQ ID NO: 33, SEQ ID NO: 34, SEQ ID NO: 35, SEQ ID NO: 36, SEQ ID NO: 37, SEQ ID NO: 38, SEQ ID NO: 39, SEQ ID NO: 40, SEQ ID NO: 41, SEQ ID NO: 42, SEQ ID NO: 43, SEQ ID NO: 44, SEQ ID NO: 45, SEQ ID NO: 46, SEQ ID NO: 47, SEQ ID NO: 48, SEQ ID NO: 49, SEQ ID NO: 50, SEQ ID NO: 51, SEQ ID NO: 52, SEQ ID NO: 53, SEQ ID NO: 54, SEQ ID NO: 55, SEQ ID NO: 56, SEQ ID NO: 57, SEQ ID NO: 58, SEQ ID NO: 59, SEQ ID NO: 60, SEQ ID NO: 61, SEQ ID NO: 62, SEQ ID NO: 63, SEQ ID NO: 64, SEQ ID NO: 65, SEQ ID NO: 66, SEQ ID NO: 67, SEQ ID NO: 68, SEQ ID NO: 69, SEQ ID NO: 70, SEQ ID NO: 71, SEQ ID NO: 72, SEQ ID NO: 73, SEQ ID NO: 74, SEQ ID NO: 75, SEQ ID NO: 76, SEQ ID NO: 77, SEQ ID NO: 79, SEQ ID NO: 80, SEQ ID NO: 81, SEQ ID NO: 82, SEQ ID NO: 83, SEQ ID NO: 84, SEQ ID NO: 85, SEQ ID NO: 86, SEQ ID NO: 87, SEQ ID NO: 88, SEQ ID NO: 89, SEQ ID NO: 90, SEQ ID NO: 91, SEQ ID NO: 92, SEQ ID NO: 93, SEQ ID NO: 94, SEQ ID NO: 95, SEQ ID NO: 96, SEQ ID NO: 98, SEQ ID NO: 99, SEQ ID NO: 100, SEQ ID NO: 101, SEQ ID NO: 102, SEQ ID NO: 103, SEQ ID NO: 104, SEQ ID NO: 105, SEQ ID NO: 106, SEQ ID NO: 108, SEQ ID NO: 109, SEQ ID NO: 131, SEQ ID NO: 132, SEQ ID NO: 133, SEQ ID NO: 134, SEQ ID NO: 135, SEQ ID NO: 136, SEQ ID NO: 137, SEQ ID NO: 138, SEQ ID NO: 139, SEQ ID NO: 140, SEQ ID NO: 141, SEQ ID NO: 142, SEQ ID NO: 143, SEQ ID NO: 144, SEQ ID NO: 145, SEQ ID NO: 146, SEQ ID NO: 147, SEQ ID NO: 148, SEQ ID NO: 149, SEQ ID NO: 150, SEQ ID NO: 151, SEQ ID NO: 152, SEQ ID NO: 153, SEQ ID NO: 154, SEQ ID NO: 155, SEQ ID NO: 156, SEQ ID NO: 157, SEQ ID NO: 158, SEQ ID NO: 159, SEQ ID NO: 160, SEQ ID NO: 161, SEQ ID NO: 162, SEQ ID NO: 163, SEQ ID NO: 164, SEQ ID NO: 165, SEQ ID NO: 166, SEQ ID NO: 167, SEQ ID NO: 168, SEQ ID NO: 169, SEQ ID NO: 170, SEQ ID NO: 171, SEQ ID NO: 172, SEQ ID NO: 173, SEQ ID NO: 174, SEQ ID NO: 175, SEQ ID NO: 177, SEQ ID NO: 178, SEQ ID NO: 179, SEQ ID NO: 180, SEQ ID NO: 181, SEQ ID NO: 182, SEQ ID NO: 183, SEQ ID NO: 184, SEQ ID NO: 185, SEQ ID NO: 186, SEQ ID NO: 187, SEQ ID NO: 188, SEQ ID NO: 189, SEQ ID NO: 190, SEQ ID NO: 191, SEQ ID NO: 192, SEQ ID NO: 193, SEQ ID NO: 194, SEQ ID NO: 196, SEQ ID NO: 197, SEQ ID NO: 198, SEQ ID NO: 199, SEQ ID NO: 200, SEQ ID NO: 201, SEQ ID NO: 202, SEQ ID NO: 203, SEQ ID NO: 204, SEQ ID NO: 205, SEQ ID NO: 206, SEQ ID NO: 207, SEQ ID NO: 208, SEQ ID NO: 209, SEQ ID NO: 210, SEQ ID NO: 211, SEQ ID NO: 212, SEQ ID NO: 213, SEQ ID NO: 214, SEQ ID NO: 215, SEQ ID NO: 216, SEQ ID NO: 217, SEQ ID NO: 218, SEQ ID NO: 219, SEQ ID NO: 220, SEQ ID NO: 221, SEQ ID NO: 222, SEQ ID NO: 223, SEQ ID NO: 224, SEQ ID NO: 225, SEQ ID NO: 226, SEQ ID NO: 227, SEQ ID NO: 228, SEQ ID NO: 229, SEQ ID NO: 230, SEQ ID NO: 231, SEQ ID NO: 232, SEQ ID NO: 233, SEQ ID NO: 234, SEQ ID NO: 235, SEQ ID NO: 236. In some embodiments, a genetically modified NIN or NLP protein is a NIN/NLP1 orthogroup protein, wherein the NIN/NLP1 orthogroup protein has at least 70% sequence identity, at least 75% sequence identity, at least 80% sequence identity, at least 85% sequence identity, at least 90% sequence identity, at least 95% sequence identity, at least 96% sequence identity, at least 97% sequence identity, at least 98% sequence identity, or at least 99% sequence identity to an amino acid sequence selected from the group consisting of SEQ ID NO: 1, SEQ ID NO: 2, SEQ ID NO: 3, SEQ ID NO: 4, SEQ ID NO: 5, SEQ ID NO: 6, SEQ ID NO: 8, SEQ ID NO: 9, SEQ ID NO: 10, SEQ ID NO: 11, SEQ ID NO: 12, SEQ ID NO: 13, SEQ ID NO: 14, SEQ ID NO: 15, SEQ ID NO: 16, SEQ ID NO: 17, SEQ ID NO: 18, SEQ ID NO: 19, SEQ ID NO: 20, SEQ ID NO: 21, SEQ ID NO: 22, SEQ ID NO: 23, SEQ ID NO: 24, SEQ ID NO: 25, SEQ ID NO: 26, SEQ ID NO: 27, SEQ ID NO: 28, SEQ ID NO: 29, SEQ ID NO: 30, SEQ ID NO: 31, SEQ ID NO: 32, SEQ ID NO: 33, SEQ ID NO: 34, SEQ ID NO: 35, SEQ ID NO: 36, SEQ ID NO: 37, SEQ ID NO: 38, SEQ ID NO: 39, SEQ ID NO: 40, SEQ ID NO: 41, SEQ ID NO: 42, SEQ ID NO: 43, SEQ ID NO: 44, SEQ ID NO: 45, SEQ ID NO: 46, SEQ ID NO: 47, SEQ ID NO: 48, SEQ ID NO: 49, SEQ ID NO: 50, SEQ ID NO: 51, SEQ ID NO: 52, SEQ ID NO: 53, SEQ ID NO: 54, SEQ ID NO: 55, SEQ ID NO: 56, SEQ ID NO: 57, SEQ ID NO: 58, SEQ ID NO: 59, SEQ ID NO: 60, SEQ ID NO: 61, SEQ ID NO: 62, SEQ ID NO: 63, SEQ ID NO: 64, SEQ ID NO: 65, SEQ ID NO: 66, SEQ ID NO: 67, SEQ ID NO: 68, SEQ ID NO: 69, SEQ ID NO: 70, SEQ ID NO: 71, SEQ ID NO: 72, SEQ ID NO: 73, SEQ ID NO: 74, SEQ ID NO: 75, SEQ ID NO: 76, SEQ ID NO: 77, SEQ ID NO: 79, SEQ ID NO: 80, SEQ ID NO: 81, SEQ ID NO: 82, SEQ ID NO: 83, SEQ ID NO: 84, SEQ ID NO: 85, SEQ ID NO: 86, SEQ ID NO: 87, SEQ ID NO: 88, SEQ ID NO: 89, SEQ ID NO: 90, SEQ ID NO: 91, SEQ ID NO: 92, SEQ ID NO: 93, SEQ ID NO: 94, SEQ ID NO: 95, SEQ ID NO: 96, SEQ ID NO: 98, SEQ ID NO: 99, SEQ ID NO: 100, SEQ ID NO: 101, SEQ ID NO: 102, SEQ ID NO: 103, SEQ ID NO: 104, SEQ ID NO: 105, SEQ ID NO: 106, SEQ ID NO: 108, SEQ ID NO: 109, SEQ ID NO: 131, SEQ ID NO: 132, SEQ ID NO: 133, SEQ ID NO: 134, SEQ ID NO: 135, SEQ ID NO: 136, SEQ ID NO: 137, SEQ ID NO: 138, SEQ ID NO: 139, SEQ ID NO: 140, SEQ ID NO: 141, SEQ ID NO: 142, SEQ ID NO: 143, SEQ ID NO: 144, SEQ ID NO: 145, SEQ ID NO: 146, SEQ ID NO: 147, SEQ ID NO: 148, SEQ ID NO: 149, SEQ ID NO: 150, SEQ ID NO: 151, SEQ ID NO: 152, SEQ ID NO: 153, SEQ ID NO: 154, SEQ ID NO: 155, SEQ ID NO: 156, SEQ ID NO: 157, SEQ ID NO: 158, SEQ ID NO: 159, SEQ ID NO: 160, SEQ ID NO: 161, SEQ ID NO: 162, SEQ ID NO: 163, SEQ ID NO: 164, SEQ ID NO: 165, SEQ ID NO: 166, SEQ ID NO: 167, SEQ ID NO: 168, SEQ ID NO: 169, SEQ ID NO: 170, SEQ ID NO: 171, SEQ ID NO: 172, SEQ ID NO: 173, SEQ ID NO: 174, SEQ ID NO: 175, SEQ ID NO: 177, SEQ ID NO: 178, SEQ ID NO: 179, SEQ ID NO: 180, SEQ ID NO: 181, SEQ ID NO: 182, SEQ ID NO: 183, SEQ ID NO: 184, SEQ ID NO: 185, SEQ ID NO: 186, SEQ ID NO: 187, SEQ ID NO: 188, SEQ ID NO: 189, SEQ ID NO: 190, SEQ ID NO: 191, SEQ ID NO: 192, SEQ ID NO: 193, SEQ ID NO: 194, SEQ ID NO: 196, SEQ ID NO: 197, SEQ ID NO: 198, SEQ ID NO: 199, SEQ ID NO: 200, SEQ ID NO: 201, SEQ ID NO: 202, SEQ ID NO: 203, SEQ ID NO: 204, SEQ ID NO: 205, SEQ ID NO: 206, SEQ ID NO: 207, SEQ ID NO: 208, SEQ ID NO: 209, SEQ ID NO: 210, SEQ ID NO: 211, SEQ ID NO: 212, SEQ ID NO: 213, SEQ ID NO: 214, SEQ ID NO: 215, SEQ ID NO: 216, SEQ ID NO: 217, SEQ ID NO: 218, SEQ ID NO: 219, SEQ ID NO: 220, SEQ ID NO: 221, SEQ ID NO: 222, SEQ ID NO: 223, SEQ ID NO: 224, SEQ ID NO: 225, SEQ ID NO: 226, SEQ ID NO: 227, SEQ ID NO: 228, SEQ ID NO: 229, SEQ ID NO: 230, SEQ ID NO: 231, SEQ ID NO: 232, SEQ ID NO: 233, SEQ ID NO: 234, SEQ ID NO: 235, and SEQ ID NO: 236.

[0126] Exemplary NLP2-3 orthogroup proteins include, but are not limited to, SEQ ID NO: 237, SEQ ID NO: 238, SEQ ID NO: 239, SEQ ID NO: 241, SEQ ID NO: 242, SEQ ID NO: 243, SEQ ID NO: 244, SEQ ID NO: 245, SEQ ID NO: 246, SEQ ID NO: 247, SEQ ID NO: 248, SEQ ID NO: 250, SEQ ID NO: 251, SEQ ID NO: 252, SEQ ID NO: 253, SEQ ID NO: 254, SEQ ID NO: 255, SEQ ID NO: 256, SEQ ID NO: 257, SEQ ID NO: 258, SEQ ID NO: 259, SEQ ID NO: 260, SEQ ID NO: 261, SEQ ID NO: 262, SEQ ID NO: 263, SEQ ID NO: 264, SEQ ID NO: 265, SEQ ID NO: 266, SEQ ID NO: 267, SEQ ID NO: 268, SEQ ID NO: 269, SEQ ID NO: 270, SEQ ID NO: 271, SEQ ID NO: 273, SEQ ID NO: 274, SEQ ID NO: 275, SEQ ID NO: 276, SEQ ID NO: 277, SEQ ID NO: 278, SEQ ID NO: 279, SEQ ID NO: 280, SEQ ID NO: 281, SEQ ID NO: 282, SEQ ID NO: 283, SEQ ID NO: 284, SEQ ID NO: 285, SEQ ID NO: 286, SEQ ID NO: 287, SEQ ID NO: 288, SEQ ID NO: 289, SEQ ID NO: 290, SEQ ID NO: 291, SEQ ID NO: 292, SEQ ID NO: 293, SEQ ID NO: 294, SEQ ID NO: 295, SEQ ID NO: 296, SEQ ID NO: 297, SEQ ID NO: 298, SEQ ID NO: 299, SEQ ID NO: 300, SEQ ID NO: 301, SEQ ID NO: 302, SEQ ID NO: 303, SEQ ID NO: 304, SEQ ID NO: 305, SEQ ID NO: 306, SEQ ID NO: 307, SEQ ID NO: 308, SEQ ID NO: 309, SEQ ID NO: 310, SEQ ID NO: 311, SEQ ID NO: 312, SEQ ID NO: 313, SEQ ID NO: 314, SEQ ID NO: 315, SEQ ID NO: 316, SEQ ID NO: 317, SEQ ID NO: 318, SEQ ID NO: 319, SEQ ID NO: 320, SEQ ID NO: 321, SEQ ID NO: 322, SEQ ID NO: 323, SEQ ID NO: 324, SEQ ID NO: 325, SEQ ID NO: 326, SEQ ID NO: 327, SEQ ID NO: 328, SEQ ID NO: 329, SEQ ID NO: 332, SEQ ID NO: 333, SEQ ID NO: 334, SEQ ID NO: 335, SEQ ID NO: 336, SEQ ID NO: 337, SEQ ID NO: 338, SEQ ID NO: 339, SEQ ID NO: 340, SEQ ID NO: 341, SEQ ID NO: 342, SEQ ID NO: 343, SEQ ID NO: 344, SEQ ID NO: 345, SEQ ID NO: 346, SEQ ID NO: 347, SEQ ID NO: 348, SEQ ID NO: 349, SEQ ID NO: 350, SEQ ID NO: 351, SEQ ID NO: 352, SEQ ID NO: 353, SEQ ID NO: 354, SEQ ID NO: 355, SEQ ID NO: 356, SEQ ID NO: 357, SEQ ID NO: 358, SEQ ID NO: 359, SEQ ID NO: 360, SEQ ID NO: 361, SEQ ID NO: 362, SEQ ID NO: 363, SEQ ID NO: 364, SEQ ID NO: 365, SEQ ID NO: 366, SEQ ID NO: 367, SEQ ID NO: 368, SEQ ID NO: 369, SEQ ID NO: 371, SEQ ID NO: 372, SEQ ID NO: 373, SEQ ID NO: 374, SEQ ID NO: 375, SEQ ID NO: 376, and SEQ ID NO: 377. In some embodiments, a genetically modified NIN or NLP protein is a NLP2-3 orthogroup protein, wherein the NLP2-3 orthogroup protein has at least 70% sequence identity, at least 75% sequence identity, at least 80% sequence identity, at least 85% sequence identity, at least 90% sequence identity, at least 95% sequence identity, at least 96% sequence identity, at least 97% sequence identity, at least 98% sequence identity, or at least 99% sequence identity to an amino acid sequence selected from SEQ ID NO: 237, SEQ ID NO: 238, SEQ ID NO: 239, SEQ ID NO: 241, SEQ ID NO: 242, SEQ ID NO: 243, SEQ ID NO: 244, SEQ ID NO: 245, SEQ ID NO: 246, SEQ ID NO: 247, SEQ ID NO: 248, SEQ ID NO: 250, SEQ ID NO: 251, SEQ ID NO: 252, SEQ ID NO: 253, SEQ ID NO: 254, SEQ ID NO: 255, SEQ ID NO: 256, SEQ ID NO: 257, SEQ ID NO: 258, SEQ ID NO: 259, SEQ ID NO: 260, SEQ ID NO: 261, SEQ ID NO: 262, SEQ ID NO: 263, SEQ ID NO: 264, SEQ ID NO: 265, SEQ ID NO: 266, SEQ ID NO: 267, SEQ ID NO: 268, SEQ ID NO: 269, SEQ ID NO: 270, SEQ ID NO: 271, SEQ ID NO: 273, SEQ ID NO: 274, SEQ ID NO: 275, SEQ ID NO: 276, SEQ ID NO: 277, SEQ ID NO: 278, SEQ ID NO: 279, SEQ ID NO: 280, SEQ ID NO: 281, SEQ ID NO: 282, SEQ ID NO: 283, SEQ ID NO: 284, SEQ ID NO: 285, SEQ ID NO: 286, SEQ ID NO: 287, SEQ ID NO: 288, SEQ ID NO: 289, SEQ ID NO: 290, SEQ ID NO: 291, SEQ ID NO: 292, SEQ ID NO: 293, SEQ ID NO: 294, SEQ ID NO: 295, SEQ ID NO: 296, SEQ ID NO: 297, SEQ ID NO: 298, SEQ ID NO: 299, SEQ ID NO: 300, SEQ ID NO: 301, SEQ ID NO: 302, SEQ ID NO: 303, SEQ ID NO: 304, SEQ ID NO: 305, SEQ ID NO: 306, SEQ ID NO: 307, SEQ ID NO: 308, SEQ ID NO: 309, SEQ ID NO: 310, SEQ ID NO: 311, SEQ ID NO: 312, SEQ ID NO: 313, SEQ ID NO: 314, SEQ ID NO: 315, SEQ ID NO: 316, SEQ ID NO: 317, SEQ ID NO: 318, SEQ ID NO: 319, SEQ ID NO: 320, SEQ ID NO: 321, SEQ ID NO: 322, SEQ ID NO: 323, SEQ ID NO: 324, SEQ ID NO: 325, SEQ ID NO: 326, SEQ ID NO: 327, SEQ ID NO: 328, SEQ ID NO: 329, SEQ ID NO: 332, SEQ ID NO: 333, SEQ ID NO: 334, SEQ ID NO: 335, SEQ ID NO: 336, SEQ ID NO: 337, SEQ ID NO: 338, SEQ ID NO: 339, SEQ ID NO: 340, SEQ ID NO: 341, SEQ ID NO: 342, SEQ ID NO: 343, SEQ ID NO: 344, SEQ ID NO: 345, SEQ ID NO: 346, SEQ ID NO: 347, SEQ ID NO: 348, SEQ ID NO: 349, SEQ ID NO: 350, SEQ ID NO: 351, SEQ ID NO: 352, SEQ ID NO: 353, SEQ ID NO: 354, SEQ ID NO: 355, SEQ ID NO: 356, SEQ ID NO: 357, SEQ ID NO: 358, SEQ ID NO: 359, SEQ ID NO: 360, SEQ ID NO: 361, SEQ ID NO: 362, SEQ ID NO: 363, SEQ ID NO: 364, SEQ ID NO: 365, SEQ ID NO: 366, SEQ ID NO: 367, SEQ ID NO: 368, SEQ ID NO: 369, SEQ ID NO: 371, SEQ ID NO: 372, SEQ ID NO: 373, SEQ ID NO: 374, SEQ ID NO: 375, SEQ ID NO: 376, and SEQ ID NO: 377.

[0127] Exemplary NLP4 orthogroup proteins include, but are not limited to, SEQ ID NO: 378, SEQ ID NO: 379, SEQ ID NO: 380, SEQ ID NO: 381, SEQ ID NO: 382, SEQ ID NO: 383, SEQ ID NO: 384, SEQ ID NO: 385, SEQ ID NO: 386, SEQ ID NO: 387, SEQ ID NO: 388, SEQ ID NO: 389, SEQ ID NO: 390, SEQ ID NO: 391, SEQ ID NO: 392, SEQ ID NO: 393, SEQ ID NO: 394, SEQ ID NO: 395, SEQ ID NO: 396, SEQ ID NO: 397, SEQ ID NO: 398, SEQ ID NO: 399, SEQ ID NO: 400, SEQ ID NO: 401, SEQ ID NO: 402, SEQ ID NO: 403, SEQ ID NO: 404, SEQ ID NO: 405, SEQ ID NO: 406, SEQ ID NO: 408, SEQ ID NO: 409, SEQ ID NO: 410, SEQ ID NO: 411, SEQ ID NO: 412, SEQ ID NO: 413, SEQ ID NO: 414, SEQ ID NO: 415, SEQ ID NO: 417, SEQ ID NO: 418, SEQ ID NO: 419, SEQ ID NO: 420, SEQ ID NO: 421, SEQ ID NO: 422, SEQ ID NO: 423, SEQ ID NO: 424, SEQ ID NO: 425, SEQ ID NO: 426, SEQ ID NO: 427, SEQ ID NO: 428, SEQ ID NO: 429, SEQ ID NO: 430, SEQ ID NO: 431, SEQ ID NO: 432, SEQ ID NO: 433, SEQ ID NO: 434, SEQ ID NO: 435, SEQ ID NO: 436, SEQ ID NO: 437, SEQ ID NO: 438, SEQ ID NO: 439, SEQ ID NO: 440, SEQ ID NO: 441, SEQ ID NO: 442, SEQ ID NO: 443, SEQ ID NO: 444, SEQ ID NO: 445, SEQ ID NO: 446, SEQ ID NO: 447, SEQ ID NO: 448, SEQ ID NO: 449, SEQ ID NO: 450, SEQ ID NO: 451, SEQ ID NO: 452, SEQ ID NO: 453, SEQ ID NO: 455, SEQ ID NO: 456, SEQ ID NO: 457, SEQ ID NO: 458, SEQ ID NO: 459, SEQ ID NO: 460, SEQ ID NO: 461, SEQ ID NO: 462, SEQ ID NO: 463, SEQ ID NO: 464, SEQ ID NO: 465, SEQ ID NO: 466, SEQ ID NO: 467, SEQ ID NO: 468, SEQ ID NO: 469, SEQ ID NO: 470, SEQ ID NO: 471, SEQ ID NO: 472, SEQ ID NO: 473, SEQ ID NO: 474, SEQ ID NO: 475, SEQ ID NO: 476, SEQ ID NO: 477, SEQ ID NO: 478, SEQ ID NO: 479, SEQ ID NO: 480, SEQ ID NO: 481, SEQ ID NO: 482, SEQ ID NO: 483, SEQ ID NO: 484, SEQ ID NO: 485, SEQ ID NO: 486, SEQ ID NO: 487, SEQ ID NO: 488, SEQ ID NO: 489, SEQ ID NO: 490, SEQ ID NO: 491, SEQ ID NO: 492, SEQ ID NO: 493, SEQ ID NO: 494, SEQ ID NO: 495, SEQ ID NO: 496, SEQ ID NO: 497, SEQ ID NO: 498, SEQ ID NO: 499, SEQ ID NO: 500, SEQ ID NO: 501, SEQ ID NO: 502, SEQ ID NO: 504, SEQ ID NO: 505, SEQ ID NO: 506, SEQ ID NO: 507, SEQ ID NO: 508, SEQ ID NO: 509, SEQ ID NO: 510, SEQ ID NO: 511, SEQ ID NO: 512, SEQ ID NO: 513, SEQ ID NO: 514, SEQ ID NO: 515, SEQ ID NO: 516, SEQ ID NO: 517, SEQ ID NO: 518, SEQ ID NO: 519, SEQ ID NO: 520, SEQ ID NO: 521, SEQ ID NO: 522, SEQ ID NO: 523, and SEQ ID NO: 524. In some embodiments, a genetically modified NIN or NLP protein is a NLP4 orthogroup protein, wherein the NLP4 orthogroup protein has at least 70% sequence identity, at least 75% sequence identity, at least 80% sequence identity, at least 85% sequence identity, at least 90% sequence identity, at least 95% sequence identity, at least 96% sequence identity, at least 97% sequence identity, at least 98% sequence identity, or at least 99% sequence identity to an amino acid sequence selected from SEQ ID NO: 378, SEQ ID NO: 379, SEQ ID NO: 380, SEQ ID NO: 381, SEQ ID NO: 382, SEQ ID NO: 383, SEQ ID NO: 384, SEQ ID NO: 385, SEQ ID NO: 386, SEQ ID NO: 387, SEQ ID NO: 388, SEQ ID NO: 389, SEQ ID NO: 390, SEQ ID NO: 391, SEQ ID NO: 392, SEQ ID NO: 393, SEQ ID NO: 394, SEQ ID NO: 395, SEQ ID NO: 396, SEQ ID NO: 397, SEQ ID NO: 398, SEQ ID NO: 399, SEQ ID NO: 400, SEQ ID NO: 401, SEQ ID NO: 402, SEQ ID NO: 403, SEQ ID NO: 404, SEQ ID NO: 405, SEQ ID NO: 406, SEQ ID NO: 408, SEQ ID NO: 409, SEQ ID NO: 410, SEQ ID NO: 411, SEQ ID NO: 412, SEQ ID NO: 413, SEQ ID NO: 414, SEQ ID NO: 415, SEQ ID NO: 417, SEQ ID NO: 418, SEQ ID NO: 419, SEQ ID NO: 420, SEQ ID NO: 421, SEQ ID NO: 422, SEQ ID NO: 423, SEQ ID NO: 424, SEQ ID NO: 425, SEQ ID NO: 426, SEQ ID NO: 427, SEQ ID NO: 428, SEQ ID NO: 429, SEQ ID NO: 430, SEQ ID NO: 431, SEQ ID NO: 432, SEQ ID NO: 433, SEQ ID NO: 434, SEQ ID NO: 435, SEQ ID NO: 436, SEQ ID NO: 437, SEQ ID NO: 438, SEQ ID NO: 439, SEQ ID NO: 440, SEQ ID NO: 441, SEQ ID NO: 442, SEQ ID NO: 443, SEQ ID NO: 444, SEQ ID NO: 445, SEQ ID NO: 446, SEQ ID NO: 447, SEQ ID NO: 448, SEQ ID NO: 449, SEQ ID NO: 450, SEQ ID NO: 451, SEQ ID NO: 452, SEQ ID NO: 453, SEQ ID NO: 455, SEQ ID NO: 456, SEQ ID NO: 457, SEQ ID NO: 458, SEQ ID NO: 459, SEQ ID NO: 460, SEQ ID NO: 461, SEQ ID NO: 462, SEQ ID NO: 463, SEQ ID NO: 464, SEQ ID NO: 465, SEQ ID NO: 466, SEQ ID NO: 467, SEQ ID NO: 468, SEQ ID NO: 469, SEQ ID NO: 470, SEQ ID NO: 471, SEQ ID NO: 472, SEQ ID NO: 473, SEQ ID NO: 474, SEQ ID NO: 475, SEQ ID NO: 476, SEQ ID NO: 477, SEQ ID NO: 478, SEQ ID NO: 479, SEQ ID NO: 480, SEQ ID NO: 481, SEQ ID NO: 482, SEQ ID NO: 483, SEQ ID NO: 484, SEQ ID NO: 485, SEQ ID NO: 486, SEQ ID NO: 487, SEQ ID NO: 488, SEQ ID NO: 489, SEQ ID NO: 490, SEQ ID NO: 491, SEQ ID NO: 492, SEQ ID NO: 493, SEQ ID NO: 494, SEQ ID NO: 495, SEQ ID NO: 496, SEQ ID NO: 497, SEQ ID NO: 498, SEQ ID NO: 499, SEQ ID NO: 500, SEQ ID NO: 501, SEQ ID NO: 502, SEQ ID NO: 504, SEQ ID NO: 505, SEQ ID NO: 506, SEQ ID NO: 507, SEQ ID NO: 508, SEQ ID NO: 509, SEQ ID NO: 510, SEQ ID NO: 511, SEQ ID NO: 512, SEQ ID NO: 513, SEQ ID NO: 514, SEQ ID NO: 515, SEQ ID NO: 516, SEQ ID NO: 517, SEQ ID NO: 518, SEQ ID NO: 519, SEQ ID NO: 520, SEQ ID NO: 521, SEQ ID NO: 522, SEQ ID NO: 523, and SEQ ID NO: 524.

[0128] Exemplary basal NIN/NLP orthogroup proteins include, but are not limited to, SEQ ID NO: 525, SEQ ID NO: 526, SEQ ID NO: 527, SEQ ID NO: 528, SEQ ID NO: 529, SEQ ID NO: 530, SEQ ID NO: 531, SEQ ID NO: 532, SEQ ID NO: 533, SEQ ID NO: 534, SEQ ID NO: 535, SEQ ID NO: 536, SEQ ID NO: 537, SEQ ID NO: 538, SEQ ID NO: 539, SEQ ID NO: 540, SEQ ID NO: 541, SEQ ID NO: 542, SEQ ID NO: 543, SEQ ID NO: 544, SEQ ID NO: 545, SEQ ID NO: 546, SEQ ID NO: 547, SEQ ID NO: 548, SEQ ID NO: 549, and SEQ ID NO: 550. In some embodiments, a genetically modified NIN or NLP protein is a basal NIN/NLP orthogroup protein, wherein the basal NIN/NLP orthogroup protein has at least 70% sequence identity, at least 75% sequence identity, at least 80% sequence identity, at least 85% sequence identity, at least 90% sequence identity, at least 95% sequence identity, at least 96% sequence identity, at least 97% sequence identity, at least 98% sequence identity, or at least 99% sequence identity to an amino acid sequence selected from SEQ ID NO: 525, SEQ ID NO: 526, SEQ ID NO: 527, SEQ ID NO: 528, SEQ ID NO: 529, SEQ ID NO: 530, SEQ ID NO: 531, SEQ ID NO: 532, SEQ ID NO: 533, SEQ ID NO: 534, SEQ ID NO: 535, SEQ ID NO: 536, SEQ ID NO: 537, SEQ ID NO: 538, SEQ ID NO: 539, SEQ ID NO: 540, SEQ ID NO: 541, SEQ ID NO: 542, SEQ ID NO: 543, SEQ ID NO: 544, SEQ ID NO: 545, SEQ ID NO: 546, SEQ ID NO: 547, SEQ ID NO: 548, SEQ ID NO: 549, and SEQ ID NO: 550.

[0129] NIN or NLP can regulate, induce, promote, or increase organogenesis, nodulation, infection, neocortical cell division activity, or lateral root formation. For example, activities of NIN or NLP can include inducing nodule primordium formation. As another example, NIN or NLP can activate gibberellin biosynthesis genes because NIN activates these genes during rhizobial infection. As yet another example, NIN or NLP can induce a nodule developmental program, such as NIN activating LBD16 and YUCCA, which promotes auxin biosynthesis. This activates a nodule developmental program that overlaps with the program induced during lateral root initiation. As yet another example, NIN or NLP can have nodule initiation activity as NIN is required for nodule initiation in response to rhizobial bacteria.

[0130] Having generally described the compositions, methods, and processes of this disclosure, the same will be better understood by reference to certain specific examples, which are included herein to further illustrate the disclosure and are not intended to limit the scope of the invention as defined by the claims.

### EXAMPLES

[0131] The present disclosure is described in further detail in the following examples which are not in any way intended to limit the scope of the disclosure as claimed. The attached figures are meant to be considered as integral parts of the specification and description of the disclosure. The following examples are offered to illustrate, but not to limit the claimed disclosure.

### Example 1: Auxin Plays an Ancestral Role in Controlling the Expression of NIN During Nodule Development

[0132] The following example describes work that indicates that NIN plays an important role during intercellular actinorhizal nodulation in Datisca glomerata where DgNIN-RNAi completely abolishes nodule organogenesis. On the other hand, overexpression of D. glomerata NIN and Dryas drummondii NIN both resulted in spatial loss of lateral root and nodule distribution in D. glomerata. While promoter analysis of NIN in the actinorhizal nodulators failed to identify any cytokinin elements, auxin responsive elements were identified within −2kb of the transcription start site that were also present in all other NLPs, suggesting an ancestral switch. Ectopic expression of NIN downstream to the synthetic DR5 promoter resulted in spontaneous organogenesis in D. glomerata. Similar experiments failed to induce any organogenesis in M. truncatula but resulted in a higher number of infection events, indicating a gradual shift in the role of auxin from organogenesis in an actinorhizal context to more of an infection regulator in legumes. The potential of the DR5:NIN was proven in non-nodulating species (strawberry and barley) where stable lines expressing the construct formed nodule-like structures (NLS) in the presence of exogenous auxin. This example highlighted how phytohormonal control of NIN evolved during the stepwise evolution of nodulation and changes associated with major shifts in the bacterial symbionts.

### Introduction

[0133] Biological nitrogen fixation requires de novo organogenesis of root nodules where nitrogen fixing filamentous actinorhizal bacteria or rhizobia fix atmospheric nitrogen into ammonia. The transcription factor (TF) NIN (Nodule Inception) belonging to the NLP (NIN-Like Protein) superfamily plays the most important role in this organogenesis process. While NLPs have recently been reported for their N-sensing capability and role in lateral root organogenesis, it is apparent that the nitrogen fixing plants neo-functionalized one of the NLPs (NIN) to act as a bridge between putative NLP functions and bacterial signal perception to initiate a nodule development program.

### Materials and Methods

Growth Condition and Hairy-Root Transformation of D. glomerata

### A. Regeneration and Production of a Uniform Population of Plants

[0134] Seeds were taken out from cold storage in 1.5 ml microcentrifuge tubes and treated with 1 ml solution A (70% ethanol and 0.05% SDS) for 1 minute with gentle shaking. Following the treatment, the seeds were treated with 1 ml solution B (20% bleach and 0.1% SDS) for 5 minutes with gentle shaking. Following the treatments, the seeds were thoroughly washed with sterile deionized water for 3-4 times with gentle agitation. The seeds in the microfuge tube were resuspended in water and covered with aluminum foil and kept in the dark for 7-10 days at 4° C. After the vernalization step, the seeds were plated on ½MS (Murashige and Skoog) media with vitamins (Duchefa) pH 5.8 and 0.8% agarose (Sigma). The plates were sealed with micropore tapes and kept at 25° C. under lights with a 16 h-day and 8 h-night cycle until they germinated. Germinated seedlings were transferred to bigger plates until well established with 4-6 leaves (approx. 4-6 weeks after germination). Young fresh leaves were collected from the apical part of the plant and chopped into 4-5 mm pieces under sterile condition. The leaf pieces were transferred to Datisca Callusing Media (DCM) containing MS supplemented with 1.5 mg/L BAP (6-Benzylaminopurine), 0.1 mg/L of NAA (α-naphthaleneacetic acid), 5 g/L of Agargel™ A3301 and 30 g/L of sucrose and adjusted to pH 5.8. Leaf pieces were grown for 10-15 days before they were transferred to Datisca Regeneration Medium (DRM) petri dishes (MS-based medium supplemented with 1.5 mg/L of BAP, 0.1 mg/L of IBA (indole-3-butyric acid), 0.1 mg/L of GA3 (gibberellic acid), 5 g/L of Agargel™ A3301 and 30 g/L of sucrose and adjusted to pH 5.8. After 8-12 weeks in DRM the callus started forming shoots which were excised from the callus and moved into Datisca Rooting Medium (MS-based medium supplemented with 1 mg/L of IBA (indole-3-butyric acid), 8 g/L of Phytoagar™ and 30 g/L of sucrose and adjusted to pH 5.8. The plants started rooting within next 3-4 weeks and matured plants could be harvested for hairy-root transformation.

B. Hairy-Root Transformation of D. glomerata

[0135] For hairy root transformation, the Agrobacterium rhizogenes QUA1 harboring the plasmid of choice were grown overnight at 28° C. in LB-media with appropriate antibiotic and shaken at 220 rpm. The next day the culture was centrifuged at 4000×g and resuspended in fresh LB media before plating on LB plates containing appropriate antibiotic for selection. The plates were maintained overnight at 28° C. to get a lawn of the bacteria. Fresh D. glomerata regenerated plant shoots were harvested using a sharp sterile scalpel and inoculated with A. rhizogenes culture from the plate. The inoculated plantlets were then transferred to HMS plates supplemented with 10% sucrose (Merck), 0.5 g/L MES (Merck), and 0.8% agarose (Sigma) and adjusted to pH 5.8. The plates were sealed with micropore tapes and 90% covered with aluminum foil and kept at 22° C. for 2 days with a 16 h-day and 8 h-night cycle. After 2 days the plantlets were removed from the plates and cleaned of any excess bacterial culture and moved to new ½MS plates supplemented with 0.5 g/L MES (Merck), 0.8% agarose (Sigma) and adjusted to pH 5.8. The plants were maintained under a 16 h-day and 8 h-night cycle at 22° C. until they started forming roots which were checked for fluorescence under the stereo-fluorescence microscope DX105 F (Leica). Once the plant started forming enough fluorescent roots, the nonfluorescent roots were excised to encourage transformed root growth. After ˜4-6 weeks, the plantlets were moved into autoclaved perlite in pots and grown for another 10 days under nutrient deprived condition before they were inoculated.

C. Nodulation Assay in D. glomerata

[0136] Actively nodulating Datisca glomerata plants with Frankia clade 2 Dg1 (Persson et al., 2015) were grown in glasshouse under a 16 h-day and 8 h-night cycle at 22-24° C. The fresh nodules were harvested from the plants and were thoroughly washed with sterile water before being crushed with a mortar and pestle to form a consistent slurry. The nodule slurry was then used for inoculating the hairy-root transformed plants by dipping the roots in it. Plants were then moved onto a sterile soil mix with perlite: low nutrient peat-based soil (1:1) and maintained under a 16 h-day and 8 h-night cycle at 22-24° C. for 8-10 weeks before they were assessed for nodulation.

D. Hormone Treatment of D. glomerata

[0137] Germinated seedlings (approx. 4 weeks after germination) are moved to ½MS plates supplemented with 0.5 g/L MES (Merck), 100⁻⁶M NAA, 0.8% agarose (Sigma) and adjusted to pH 5.8. The seedlings were maintained for 10 days under a 16 h-day and 8 h-night cycle at 22-24° C. before harvesting for RNA extraction.

Growth Condition and Hairy-Root Transformation of M. truncatula

### A. Plant Material Used in the Study

[0138] M. truncatula ecotype A17 was used as a wild-type background for hairy-root transformation and for comparison to nin1 as previously described (Marsh et al., 2007). A17:Enod11-GUS lines were also used as a wild-type background to study the role of pDR5:NIN during nodulation (Marsh et al., 2007).

B. Hairy-Root Transformation of M. truncatula

[0139] Seeds were scarified with concentrated sulfuric acid in a microfuge tube for 1-2 mins until the seed coat started showing scars. Following the scarification, the sulfuric acid was thoroughly washed with sterile water for 4-5 times to remove any trace of the acid. Scarified seeds were surface sterilized using 15% (v/v) bleach solution and 1% (v/v) Tween-20 (Merck) for 15 minutes. The seeds were then thoroughly washed with sterile water and kept at 4° C. overnight in dark. The next day the seeds were plated on water droplets and allowed to germinate in darkness at 22° C. Agrobacterium rhizogenes harboring the plasmid of choice were grown overnight at 28° C. in LB-media with appropriate antibiotic and shaken at 220 rpm. The next day the culture was centrifuged at 4000×g and resuspended in fresh LB media before plating on LB plates containing appropriate antibiotic for selection. The plates were maintained overnight at 28° C. to get a lawn of the bacteria. The next day the plantlets were removed from the germination plates and hairy root transformation was done according to a previously published protocol (Boisson-Dernier et al., 2001). After the transformation, the plants were transferred to FPmod plates (Schiessl et al., 2019). The plants were maintained at 22° C. with a 16 h-day and 8 h-night cycle until they start forming transformed hairy-roots which were checked under a stereo-fluorescence microscope DX105 F (Leica).

### C. Nodulation Assay of the Hairy-Root Transformed Plants

[0140] Sinorhizobium meliloti strain 2011 (Lerouge et al., 1990) expressing pnifH:eGFP was used. The S. meliloti 2011 was grown in YEM media for 2 days at 28° C. The bacterial culture was diluted to a final concentration of 0.02 OD 600 nm using BNM (Buffered NOD) media. After maintaining the hairy-root transformed plants in nutrient deprived conditions for 3-4 days in perlite, the plants were inoculated with the S. meliloti culture (2 ml of 0.02 OD 600 nm) and maintained in perlite. Plants were grown for up to a further 4 weeks for nodule quantification and histochemical staining.

D. Hormone Treatment of M. truncatula

[0141] Germinated seedlings (approx. 4 days after germination) are moved to FPmod plates supplemented with 0.1 μM, 1 μM, or 10 μM NAA, 0.8% agarose (Sigma), and adjusted to pH 7. The seedlings were maintained for 16 hours and 2 days under 16 h-day and 8 h-night cycle at 24-22° C. before harvesting them for RNA extraction.

Raising Stable Lines of F. vesca (Strawberry)

### A. Seed Germination and Meristem Propagation

[0142] F. vesca Hawaii 4 seeds were harvested from the matured fruits and dried on filter paper at 37° C. Dried seeds were labelled and packed in envelopes and stored at 4° C. Seeds were scarified with 70% ethanol followed by 1M sulfuric acid (H₂SO₄) solution before they were thoroughly washed with water. To initiate germination, scarified seeds were plated on water agar and kept at 22° C. The germinated seedlings were propagated on nutrient rich soil in a glasshouse at 22-24° C. under long day (16 hours days-8 hours night) conditions to initiate runners. Fresh runners were harvested in water and transferred to the lab where, using a Leica stereomicroscope M165, the meristems were harvested using a scalpel. This tissue was immediately transferred to tubes containing strawberry propagation medium (SPM), taking special care to prevent desiccation. SPM is a MS-based medium (2.2 g/L) supplemented with 0.1 mg/L of BAP and 0.1 mg/L indole-3-butyric acid (IBA) and solidified with Daishin agar (Duchefa D1004, 9 g/L); the pH was adjusted to 5.8 before autoclaving. The tubes were maintained in a growth room at 20° C. under long day conditions until they regenerated into plantlets. Following shoot maturation, the plantlets were transferred to honey jars (HS French Flint Ltd, London, UK) containing SPM, where they were maintained for regular work.

### B. Plant Material and In Vitro Micropropagation

[0143] In vitro shoot cultures of F. vesca Hawaii 4 were sub-cultured at 4-6-week intervals, 5 per honey jar containing 50 ml medium. Strawberry multiplication medium (SMM) and SPM were alternated in each round of subculturing. Both basal culture media were composed of Murashige and Skoog (MS) macro and micro elements and vitamins, supplemented with sucrose (30 g/L) and 0.5 mg/L of 6-benzylaminopurine (BAP), solidified with Daishin agar (Duchefa D1004, 9 g/L) and the pH was adjusted to 5.8 before autoclaving.

### C. Transformation and Regeneration of Transgenic Plants

[0144] To prepare plant material for transformation, petioles were harvested the day before the transformation from the youngest (most apical) leaves. The plant cultures used were four to six weeks old after the last subculture.

[0145] A. tumefaciens strain EHA105 with the binary vector were grown overnight (200 rpm, 28° C.) in LB media with appropriate antibiotics. The culture was pelleted at 2,000×g for 10 minutes and re-suspended in filter-sterilized liquid MS-based medium supplemented with glucose (30 g/L) and acetosyringone (100 μM), pH 5.2, to give OD 600 nm=0.2-0.3. Petioles were cut into 4-5 mm pieces, submerged in the inoculum, and blotted on sterile filter paper to remove excess inoculum. The petiole pieces were then transferred to Strawberry Regeneration Medium (SRM) petri dishes (MS-based medium supplemented with 0.2 mg/L of α-naphthaleneacetic acid, 1 mg/L of thidiazuron (TDZ), 5 g/L of Agargel™ and 30 g/L of glucose and adjusted to pH 5.8). Petioles were co-cultivated in the dark for four days at 20° C. After the incubation, explants were washed in a solution of filter-sterilized ticarcillin disodium/clavulanate potassium (TCA, Duchefa) (400 mg/L) in water for 4 hours (60 rpm, 20° C.), then blotted and transferred to T25 Cell Culture Flasks (Nunc) containing 15 ml of liquid SRM with antibiotic selection. Flasks were placed in a shaker at 60 rpm, 20° C., under low light intensity for 4 weeks, and then blotted and transferred to SRM selection petri dishes. Petioles were sub-cultured every 4 weeks until regeneration. Control (WT) shoots were regenerated using the same method, except that the explants were not co-cultivated with A. tumefaciens and selection antibiotics were omitted from the culture media. The transformed shoots were transferred to 30 ml universal tubes (Fisher Scientific) containing 15 ml of rooting medium (Frag R) with selection. Frag R is MS-based medium (2.2 g/L) supplemented with 0.1 mg/L of BAP and 0.1 mg/L IBA and 20 g/L of glucose, solidified with 9 g/L of Daishin agar (Duchefa) and adjusted to pH 5.8. After 4 weeks, shoots were moved to tubes containing SMT medium (MS-based medium supplemented with 0.225 mg/L of BAP, 0.2 mg/L IBA, 0.1 mg/L gibberellic acid (GA3) and 30 g/L of glucose, solidified with 7.5 g/L of Sigma-Aldrich agar and adjusted to pH 5.6 before autoclaving). In the next subculturing step, plants were changed to SMM tubes.

[0146] After 4 weeks in SMM tubes, plants were mature enough to be moved to honey jars (5 plants per jar). Honey jars with SMM medium or Strawberry Medium for Rooting (SMR) were alternated at 4-6-week intervals. SMR medium is a MS-based medium supplemented with 0.4 mg/L of IBA, 0.1 mg/L gibberellic acid (GA3) and 30 g/L of glucose, solidified with 7.5 g/L of Sigma-Aldrich agar A1296 and adjusted to pH 5.6 before autoclaving.

### D. Genotyping of Transgenic Lines

[0147] DNA were extracted from 50-100 mg of leaf tissue using the following protocol. The frozen leaf tissue was ground with metal ball-bearing balls (IG100_5/32_PK1000; Simply Bearings Ltd., Leigh, UK) using a mechanical pulverize (MiniG® from Spex) at 1200 rpm for 30 seconds. 500 μl of the extraction buffer (1.25% sodium dodecyl sulfate; 100 mM Tris HCl pH 8.0; 50 mM EDTA pH 8.0 and 25 mg PVP) were added to the disrupted tissue. The samples were mixed and incubated at 65° C. for 30 minutes, inverting the tubes every 5 minutes. Samples were cooled by placing them in ice for around 5 minutes and then 250 μl of chilled 5M NaCl, mix and incubate in ice for 15 more min. The samples were centrifuged for 10 minutes at 20,000×g. Supernatant was transferred into a new tube containing 360 μl of isopropanol. Samples were vortexed and incubated for 30 minutes or overnight at −20° C. to allow DNA to precipitate. The samples were centrifuged for 20 minutes at 15,700×g. Supernatant was discarded and pellet was washed in 500 μl of 70% ethanol. The samples were centrifuged for 20 minutes at 15,700×g and supernatant was discarded. Washing step was repeated once more and supernatant was discarded. Each pellet was resuspended in 50 μl TE buffer (10 mM Tris HCl pH 8.0; 1 mM EDTA pH 8.0). PCR amplification was performed using gene specific primers and PCRBIO Taq Mix Red (PCR Biosystems) following the manufacturer's guidelines.

E. Hormone Treatment of F. vesca

[0148] Tissue culture plants growing in SMR (approximately 4 weeks after transfer) were moved to ½ Hoagland's media plates supplemented with 100⁻⁶M NAA, 0.8% agarose (Sigma). The plants were maintained for 4 weeks under a 16 h-day and 8 h-night cycle at 22-24° C. before harvesting for phenotyping and RNA extraction.

### Construct Production

[0149] The Golden Gate modular cloning system was used to prepare the plasmids for the transformation experiments (Weber et al., 2011). All the Level 0, Level 1, and Level 2 constructs are listed in Tables 1-3, respectively. Sequences were domesticated, synthesized, and cloned into pMS (GeneArt, Thermo Fisher Scientific, Waltham, USA). Sequence information was obtained for MtNIN (M. truncatula Mt4.0v1 genome via Phytozome (phytozome[dot]jgi[dot]doe[dot]gov)) (Goodstein et al., 2012) and DgNIN (D. glomerata (ASM325502v1)) and DryasNIN (D. drummondii (ASM325486v1)) from NCBI (Griesmann et al., 2018). For the DgNIN-RNAi construct the fragment was amplified using forward primers 5′-ccgggattccgctatggtcagcaggttgatg-3′ (SEQ ID NO: 647) with BamH1 overhang and reverse primer 5′-cgcctcgagcagaatgcttgtaacacccag-3′ (SEQ ID NO: 648) with Xho1 overhang and cloned into entry vector pENTR3c dual (Invitrogen) and sequenced for confirmation. The entry clone was recombined into the destination vector pK7GWIWG2-7F2.1 (VIB, Ghent) using the LR clonase Gateway cloning kit (Invitrogen) (see Table 2 and Table 3).

TABLE 1
Level 0 construct assembly sheet.
PU = promoter; SC = coding region; T = terminator.

| EC | |
|---|---|
| number | Construct details |
| EC37362 | pL0M-PU-pDatiscaNIN_F1-5-37362 |
| EC54188 | pL0B-PU-pDatiscaNIN2_F1-5-54188 |
| EC37363 | pL0-PU-pDryasNIN_F1-5-37363 |
| EC55328 | pL0M-PU-pMtNIN(3C) + 3XMtCYC + 35S-55328 |
| EC25116 | pL0M-PU-pDR5 |
| EC15057 | pL0M-PU-pNOS-15057 |
| EC51266 | pL0M-PU-35S-TMV-1-51266 |
| EC15251 | pL0M-PU-LjUBI-15251 |
| EC54611 | pL0B-PU-pMtNINsyn-54611 |
| EC54614 | pL0B-PU-pMtNINsynAuxREmut-54614 |
| EC54535 | pL0M-S-n2-Staygold-CO-54535 |
| EC75111 | pL0M-SC-GUS-intron-75111 |
| EC15068 | pL0M-SC-Kan-15068 |
| EC15071 | pL0M-SC-mCherry-15071 |
| EC61119 | pL0M-SC-MtNIN(CDS)-61119 |
| EC54016 | pL0B-SC-DgNIN_cDNA-F1-3(CDS)-54016 |
| EC54189 | pL0B-SC-DatiscaNIN2-cDNA_F1-2-54189 |
| EC54041 | pL0B-SC-Dryas_drumNIN_cDNA_F1-3(CDS)-54041 |
| EC61120 | pL0M-C-MtNIN(CDS)-61120 |
| EC15318 | pL0M-T-Rbcs-15318 |
| EC41414 | pL0M-T-35S-1-41414 |
| EC41421 | pL0M-T-Nos-41421 |
| EC41432 | pL0M-T-ocs-1-41432 |

TABLE 2
Level 1 construct assembly sheet.

| EC | |
|---|---|
| number | Construct details |
| EC15029 | pL1M-R1-pNOS-Kan-tNOS-15029 |
| EC54091 | pL1B-R3-p35S-mcherry-t35S-54091 |
| EC54007 | pL1B-R2-pDatiscaNIN-GUS-tocs-54007 |
| EC54115 | pL1B-R2-pDryasNIN-GUS-tNOS-54115 |
| EC54019 | pL1B-R2-pDR5-GUS-tNOS-54019 |
| EC54021 | pL1B-R2-pDR5-DgNIN-tNOS-54021 |
| EC54197 | pL1B-R2-pDR5-DdNIN_cDNA-tNOS-54197 |
| EC54118 | pL1B-R3-pLjUBI-3xHA-DdNIN-trbcs-54118 |
| EC54562 | pL1B-R3-pLjUBI-DgNIN-FLAG-tNOS-54562 |
| EC54541 | pL1B-R2-pMtNIN(3C) + 3XMtCYC + 35S-GUS-tNOS- |
| | 54541 |
| EC54542 | pL1B-R2-pDR5-MtNIN_CDS-tNOS-54542 |
| EC54543 | pL1B-R2-pMtNIN(3C) + 3XMtCYC + 35S-MtNIN_CDS- |
| | tNOS-54543 |
| EC54544 | pL1B-R2-pMtNIN(3C) + 3XMtCYC + 35S-DgNIN_CDS- |
| | tNOS-54544 |
| EC54545 | pL1B-R2-pMtNIN(3C) + 3XMtCYC + 35S-DdNIN_CDS- |
| | tNOS-54545 |
| EC54327 | pL1B-R2-pDdNIN-DdNIN-tNOS-54327 |
| EC54264 | pDgNIN-RNAi pENTR3c-54264 |
| EC54621 | pL1B-R2-pMtNINsyn-MtNIN-tNOS-54621 |
| EC54622 | pL1B-R2-pMtNINsynAuxREmut-MtNIN-tNOS-54622 |
| EC54574 | pL1B-R2-pLjUBI-Staygold-MtNIN-tNOS-54574 |
| EC54198 | EC54198 pL1B-R2-pDgNIN2-GUS-tOcs-54198 |
| EC54564 | EC54564 pL1B-R3-pLjUBI-DgNIN2-FLAG-tNOS-54564 |

TABLE 3
Level 2 construct assembly sheet.

| | | Transformed plants | | | |
|---|---|---|---|---|---|
| EC | | D | M. | F. | H. |
| number | Construct details | glomerata | truncatula | vesca | vulgare |
| EC54010 | EC54010 pL2B-Kan-pDgNIN-GUS- | X | X | | |
| | tNOS-p35S-mCherry-t35S-54010 | | | | |
| EC54119 | EC54119 pL2B-Kan-pDdNIN-GUS- | X | X | | |
| | tNOS-p35S-mCherry-t35S-54119 | | | | |
| EC54096 | EC54096 pL2B-Kan-pDR5-GUS-tNOS- | X | X | X | |
| | p35S-mCherry-t35S-54096 | | | | |
| EC54097 | EC54097 pL2B-Kan-pDR5- | X | | | |
| | DgNIN_cDNA-tNOS-p35S-mCherry- | | | | |
| | t35S-54097 | | | | |
| EC54208 | EC54208 pL2B-Kan-pDR5- | X | X | X | |
| | DdNIN_cDNA-tNOS-p35S-mCherry- | | | | |
| | t35S-54208 | | | | |
| EC54123 | EC54123 pL2B-Kan-pLjUBI-DdNIN- | X | | | |
| | 3xMyc-trbcs-p35S-mCherry-t35S- | | | | |
| | 54123 | | | | |
| EC54570 | EC54570 pL2B-Kan-p35S-mCherry- | X | | | |
| | t35S-pLjUBI-DgNIN-FLAG-tNOS- | | | | |
| | 54570 | | | | |
| EC54548 | EC54548 pL2B-Kan- | | X | | |
| | pMtNIN(3C) + 3XMtCYC + 35S-GUS- | | | | |
| | tNOS-p35S-mCherry-t35S-54548 | | | | |
| EC54549 | EC54549 pL2B-Kan-pDR5- | | X | | |
| | MtNIN_CDS-tNOS-p35S-mCherry- | | | | |
| | t35S-54549 | | | | |
| EC54550 | EC54550 pL2B-Kan- | | X | | |
| | pMtNIN(3C) + 3XMtCYC + 35S- | | | | |
| | MtNIN_CDS-tNOS-p35S-mCherry- | | | | |
| | t35S-54550 | | | | |
| EC54551 | EC54551 pL2B-Kan- | | X | | |
| | pMtNIN(3C) + 3XMtCYC + 35S- | | | | |
| | DgNIN_CDS-tNOS-p35S-mCherry- | | | | |
| | t35S-54551 | | | | |
| EC54552 | EC54552 pL2B-Kan- | | X | | |
| | pMtNIN(3C) + 3XMtCYC + 35S- | | | | |
| | DdNIN_CDS-tNOS-p35S-mCherry- | | | | |
| | t35S-54552 | | | | |
| EC54325 | EC54325 pL2B-Kan-pDdNIN-DdNIN- | | X | | |
| | tNOS-p35S-mCherry-t35S-54325 | | | | |
| EC54272 | EC54272 pK7GWIWG2-7F2.1-Kan- | X | | | |
| | p35S-DgNIN-RNAi-t35S-p35S-eGFP- | | | | |
| | t35S-54272 | | | | |
| EC54623 | pL2B-Kan-pMtNINsyn-MtNIN-tNOS- | | X | | |
| | p35S-mCherry-t35S-54623 | | | | |
| EC54624 | pL2B-Kan-pMtNINsynAuxREmut- | | X | | |
| | MtNIN-tNOS-p35S-mCherry-t35S- | | | | |
| | 54624 | | | | |
| EC54634 | pL2B-p35S-mCherry-t35S-pMtNINsyn- | | X | | |
| | MtNIN-tNOS-pDR5-GUS-trbcs-54634 | | | | |
| EC54635 | pL2B-p35S-mCherry-t35S- | | X | | |
| | pMtNINsynAuxREmut-MtNIN-tNOS- | | | | |
| | pDR5-GUS-trbcs-54635 | | | | |
| EC54338 | pL2B-Hyg-pDR5-DgNIN_cDNA- | | | | X |
| | tNOS-p35S-mCherry-t35S-54338 | | | | |
| EC70781 | pL2B-nptII-pZmUBI-mCherry- | | | | X |
| | pDR5::GUS-70781 | | | | |
| EC70785 | pL2B-nptII-pZmUBI-mCherry- | | | | X |
| | pDR5::NLS_eGFP-70785 | | | | |
| EC54203 | pL2B-Kan-pDgNIN2-GUS-tOcs-p35S- | X | | | |
| | mCherry-t35S-54203 | | | | |
| EC54572 | pL2B-Kan-p35S-mCherry-t35S- | X | | | |
| | pLjUBI-DgNIN2-FLAG-tNOS-54572 | | | | |

TABLE 4
Primers used.

| | | SEQ ID |
|---|---|---|
| Primer name | Sequence | NO |
| DgActin qRT-for | ggaatggaagc | 632 |
| | tgctggaatc | |
| DgActin qRT-rev | ggtctgcaata | 633 |
| | cctgggaac | |
| DgNIN qRT-for | ggttagaggta | 634 |
| | acagactcatc | |
| | cattc | |
| DgNIN qRT-rev | caggatcttca | 635 |
| | tgatcttggta | |
| | gattg | |
| DgNIN2 qRT-for | caaggacgttg | 636 |
| | gatggattcct | |
| | caaatgg | |
| DgNIN2 qRT-rev | cgtgattggcc | 637 |
| | tgatcttcttc | |
| | gtag | |

### Gene Expression Analysis

[0150] Each plant root system consisting of transformed root or nodules was harvested and each individual root system formed a biological replicate; 3 or more technical replicates were prepared from each root system having a 100-150 mg sample. RNA was extracted using a modified extraction buffer containing 2% SDS (v/v), 100 mM Tris-HCl pH 8.0, 1.4M NaCl, and 20 mM EDTA. The samples were crushed with tungsten-carbide beads (Qiagen) in a mechanical pulverize (Spex Geno/Grinder®) in the presence of 12 μl/ml β-mercaptoethanol (Sigma) and 50 mg PVPP (Sigma). The powder was resuspended with the extraction buffer followed by treatment with chloroform:iso-amyl alcohol (24:1)(Melford) and chloroform (Sigma). The RNA was precipitated using 7.5M Lithium Chloride solution. The precipitated RNA was washed with 75% ethanol followed by air drying and re-suspension in deionized water. The extracted RNA was quantified using a NanoDrop® (Thermo) and then treated for DNase digestion using TURBO DNA-free™ kit (Thermo) using the manufacturer protocol. 500 ng of the treated RNA was then reverse transcribed to make cDNA using Superscript™ III (Invitrogen) using manufacturer protocol. Quantitative real-time polymerase chain reaction (qRT-PCR) was performed in technical replicates using SyGreen mix Lo-ROX (PCR Biosystems) using QuantStudio™ 7 Flex system (ABI) in a total volume of 10 μl. The primer pairs for gene expression analysis are listed in Table 4.

### Histochemical Assays and Staining

[0151] For GUS staining the harvested roots were thoroughly cleaned in sterile water and scored under the stereo-fluorescent microscope so that only the transformed roots were harvested for the staining purpose. The roots were fixed in 90% acetone on ice for 1 hour. Subsequently, the acetone was replaced with 50 mM phosphate buffer pH7.2 (Sigma) and the roots were washed twice to remove any acetone. The roots were then moved to the staining solution containing 0.1M Phosphate buffer, 0.25 mM K₃[Fe(CN)₆](potassium ferricyanide), 0.25 mM K₄[Fe(CN)₆](potassium ferrocyanide), 0.25% (v/v) Triton X-100 and 1 mM 5-bromo-4-chloro-3-indolyl beta-D-glucuronide (X-Gluc, Thermo). The samples were vacuum infiltrated for 30 minutes and incubated at 37° C. overnight. After staining the tissues were cleared of all the staining solution and stored in 50% ethanol for imaging under the stereomicroscope DX105 F (Leica). For ruthenium red staining the staining solution was prepared (0.1% ruthenium red in sterile water) and a few microliters are added over each section and subsequently washed using sterile deionized water. For toluidine blue staining, 0.1% toluidine blue staining solution was prepared in deionized water and a few microliters are added over each section and subsequently washed using sterile deionized water.

### Tissue Sections

[0152] Roots and nodules are fixed with 2.5% glutaraldehyde (Sigma) in 1×PBS overnight. The fixed material was dehydrated in an ethanol series and subsequently embedded in Technovit® 7100 (Kulzer Technik, Wehrheim, Germany) according to the manufacturer protocol. Embedded tissues were sectioned (10-15 μm) using a Leica microtome (HistoCore AUTOCUT®) and mounted on glass slides followed by staining with ruthenium red solution or toluidine blue staining solution. Tissue sections were imaged using a stereomicroscope DX105 F (Leica) using LAS 3.4 software.

### Phenotypic Analysis

A. M. truncatula Hairy-Root Experiments

[0153] To quantify the total number of curled root hair, extended root hair, and infection patch, each transgenic root was considered as an independent system and all the structures were scored in random sections of ˜1 cm according to Liu et. al., 2019. The nodules were counted in all the transformed roots using a stereo microscope DX105 F (Leica) using LAS 3.4 software.

B. D. glomerata Hairy-Root Experiments

[0154] Whole plants were imaged using ImageQuant™ 800 platform (Cytiva) with proprietary software and final images are processed using Photoshop 2024. The higher magnification images were captured using a stereo microscope DX105 F (Leica) using LAS 3.4 software.

C. F. vesca Whole Transgenics

[0155] Whole plants were imaged using a stereo microscope DX105 F (Leica) using LAS 3.4 software.

### Phylogenetic Analysis and Prediction of Auxin Binding Sites

[0156] NIN homologues were searched using the reciprocal BLAST function in Geneious v2021.1.1 against the publicly available genomes of Medicago truncatula (Tang et al., 2014), Lotus japonicus (Sato et al., 2008), Vigna unguiculata (LIS), Arachis (Bertioli et al., 2016), Cicer (Varshney et al., 2013), Cajanus (Varshney et al., 2012), Glycine (Schmutz et al., 2010), Parasponia (van Velzen et al., 2018); Alnus, Discaria (Ocheotphila), Dryas, Datisca, Casuarina (Griesmann et al., 2018); Cercocarpus (this study), Ceanothus (this study) and Lupin (Hane et al., 2017). The NIN proteins were aligned in MEGA10 using clustalW, and the alignment was subsequently used to prepare the ML-tree. Based on the transcriptional start site, the cyclops binding site was identified in the upstream promoter region. In the extracted genomic sequences the putative auxin responsive elements (AuxREs) were identified and the positions were plotted in R using the ggridges 0.5.4 package (Wilke, 2022).

### RNA Extractions

[0157] RNA was extracted from 250-500 mg of root tissue of D. glomerata, M. truncatula, and F. vesca.

### RNAseq Analysis

[0158] RNA integrity was assessed using the Agilent TapeStation system using RNA screen tape. Library preparation and paired-end RNA sequencing was performed on an Illumina NovaSeq™ 6000 platform.

[0159] Raw reads were quality controlled using FastQC v0.11.9 (S. Andrews, 2010), and adapters and low-quality regions were trimmed using Kallisto using a sliding window of 4 and minimum PHRED score of 20 (Bray et al., 2016). The first 10 nucleotides were trimmed and reads less than 100 nucleotides and unpaired reads were discarded. Assemblies were indexed and reads were aligned using Kallisto using the default settings for paired end reads (Bray et al., 2016). Quantification was performed using featureCounts v2.0.1 and differential expression analysis was performed with the R package DESeq2 v3.17 (Liao et al., 2014; Love et al., 2014).

### Realtime PCR

[0160] Total RNA was reverse-transcribed using SuperScript™ III Reverse Transcriptase (Life Technologies) and anchored dT17 primers as described in the manufacturer's protocol. About 1 μl of cDNA was used to set up real-time RT-qPCR in a 20-1 reaction system with 2×SYBR™ Green PCR master mixes (PCR biosystems) using an ABI Proflex7 Real-Time PCR system. PCR program: 1 cycle at 50° C. for 2 min, 1 cycle at 95° C. for 5 min, and 40 cycles at 95° C. for 30 s and 60° C. for 30s. Expression data were obtained from 3 independent biological repetitions. Calculations were done using the cycle threshold method using MtEF1a, DgActin and FvHistoneH4 as the endogenous control.

### Results and Discussion

### Phylogenetically Actinorhizal NIN is Closer to the NLPs in Retaining the Nitrate Sensing Domain.

[0161] NIN belongs to a bigger family of transcription factors known as NIN like-proteins (NLPs) which is ubiquitously present in land plants starting from green algae (Chlamydomonas reinhardtii), red algae (Porphyra umbilicalis), and liverworts (Marchantia polymorpha) to eudicots and monocots (Mu & Luo, 2019). The number of NLPs varies considerably depending upon whether the plant lineage experienced any duplication or triplication event during evolution, as seen in poplar (Tuskan et al., 2006). NIN was first reported from Lotus japonicus where it was found to play an important role in nodule development (Schauser et al., 1999). Comparative genomics study of plants within the nitrogen fixation clade (NFN) indicated that NIN was only retained in the functional nodulators and any loss or pseudogenisation resulted in complete loss of symbiotic nitrogen fixation capability (Griesmann et al., 2018; van Velzen et al., 2018). Whole genome sequencing of the actinorhizal plants like Cercocarpus, Ceanothus and Purshia indicated the presence of a single copy of full-length NIN (FIG. 1A, Rosales clade). At the same time, the presence of two copies of NIN were also identified in Datisca glomerata (DgNIN1 (also referred to as DgNIN) and DgNIN2) (FIG. 1A, Cucurbitales clade). The presence of 2 copies of NIN is not unique to D. glomerata as similar NIN duplication was also reported for the Dalbergoid legume Arachis hypogaea (Bhattacharjee et al., 2022). Expression analysis of both the NIN copies indicates that they are highly expressed in the symbiotic nodules indicating their potential role in intercellular actinorhizal nodule development in D. glomerata (FIG. 1B).

[0162] NIN codes for a transcription factor with a N-terminal region whose role during nodule development has yet to be determined, followed by the DNA binding RWP-RK motif and the protein-protein interacting PB1 domain (FIG. 1C, top) (Schauser et al., 1999). It has recently been found that the N-terminal region of the NLP has a nitrate sensing role and subsequently was termed the nitrate responsive domain (NRD) (Konishi & Yanagisawa, 2013). The actinorhizal NIN proteins, including DgNIN1 and DgNIN2, show significant differences in the N-terminal region as compared to the legume NINs (FIG. 1C, bottom). One major difference is the retention of the conserved serine residue in the NRD for the actinorhizal NINs which is lost in the legume NINs except for the Chamaecrista (FIG. 1C). The conserved 5205 in Arabidopsis NLP7 is essential for phosphorylation by CPK and its retention in the nucleus (K. H. Liu et al., 2017). The loss of the serine in legume is often regarded as an evolutionary shift for the NIN to take a role in nitrogen fixation from being a nitrate sensor in the distant ancestor (Suzuki et al., 2013). Thus, the homology of the actinorhizal NINs to the NLPs indicated their ancestral adaptation as a protein with a possible dual role in nitrogen fixation as well as being a nitrate sensor. A similar observation was made in poplar, where 4 out of the 5 full length NINs retained the serine residue (Irving et al., 2022).

### Spatiotemporal Expression Pattern of NIN During Intercellular Actinorhizal Nodule Development.

[0163] To check the spatiotemporal expression profile of the DgNIN during actinorhizal nodule development, the 5kb promoter pDgNIN_5kb was cloned upstream of the GUS reporter gene and transformed into the hairy roots of Datisca glomerata. The roots were harvested 8 weeks after infection (8WAI) with clade 2 Frankia Dg1. While the transformed roots under control condition did not produce any GUS staining, the primordia-like structure showed intense GUS stain throughout the structure (FIGS. 2A-2B). Comparatively, matured nodules only showed GUS staining at the upper part of the nodule with almost no staining in the proximal end (FIG. 2C). Ultrastructure analysis of the primordia reveals that the GUS staining was very prominent in the meristem, the vascular bundle, and the cortex, which is devoid of any identifiable infection zone (FIG. 2D). It is possible that this early induction of NIN was due to the presence of intercellular Frankia which were yet to form nitrogen fixing vesicles inside the plant cell. A similar early expression of Casuarina NIN in the infected root hairs indicated the role of actinorhizal NIN during infection (Clavijo et al., 2015). Matured nodules showed expression in the vascular bundle and meristem with the infected cells in the infection zone not showing much staining (FIG. 2E). The expression pattern was consistent with what had been observed previously in Casuarina where only uninfected cells adjacent to the infected cells showed pCgNIN:GUS expression (Clavijo et al., 2015). A duplication event in the Cucurbitales clade resulted in the formation of DgNIN2, and the promoter pDgNIN2_5kb showed some basal expression under control conditions, unlike pDgNIN_5kb (FIGS. 2F-2G). Although no primordia with GUS expression were detected, mature nodules did show staining, indicating GUS activity during nodule maturation (FIG. 2H). Ultrastructure analysis showed that, unlike pDgNIN 5kb, pDgNIN2_5kb was expressed near the infection zone and away from the meristem (FIGS. 2I-2J). The promoter activity was supported by the relative expression data in the D. glomerata nodules which shows ˜100 to ˜400-fold increase in expression for DgNIN and DgNIN2 respectively as compared to the roots (FIG. 1B). To check whether there is any conservation in the expression pattern of the NIN promoter between actinorhizal plants, the pDgNIN_Skb:GUS was transformed into the hairy root of M. truncatula A17 plants (FIGS. 3A-3I). As compared to the pMtNIN:GUS which was elicited at the base of the extending infection thread at 2WAI with Sinorhizobium meliloti Sm1021-eGFP, pDgNIN_Skb:GUS did not show any activation of GUS expression (FIGS. 3A-3B). In the later stage when the organogenesis was well established, however, the promoter activity looks comparable. pDgNIN_Skb:GUS showed very bright staining in the infection zone and vascular bundle (FIGS. 3B, 3C, 3E, and 3F).

[0164] To investigate whether actinorhizal NIN coming from another plant which was also infected by the clade 2 Frankia intercellularly behaved in a similar fashion, the 5kb region of the Dryas drummondii NIN was cloned upstream to GUS and transformed into hairy roots of D. glomerata. Eight weeks after infection there were primordia-like structures as well as matured nodules that showed GUS stain, as compared to no stain in the control transformed roots (FIGS. 2K-2L). Unlike the pDgNIN 5kb, the pDryasNIN_5kb showed staining in the distal part of the nodule away from the nodule meristem (FIG. 2M). Ultrastructure analysis further revealed that pDryasNIN_5kb was not active in the meristem of the primordia and was only present in the vascular bundle and cortex which was yet to form an infection zone (FIG. 2N). In the mature nodule the GUS staining was observed in the outer uninfected cortical layer and in the infected cells (FIG. 2O). Previous reports in M. truncatula indicated that NIN is expressed in the distal part of the nodule and specifically in the infection zone and the vascular bundle (J. Liu et al., 2021). Thus, the expression pattern of pDryasNIN is more resemblant of legumes as compared to pDatiscaNIN, supporting the inherent complexity of NIN regulation during nodule development. Expressing pDryasNIN_5kb:GUS in M. truncatula hairy root indicated their lack of epidermal expression post infection at two weeks after infection (FIG. 3G) as was previously observed in the case of pDgNIN:GUS. But by four weeks after infection, pDryasNIN_5kb showed comparable expression pattern to pMtNIN, which indicated that the organogenesis role of the promoter was conserved (FIGS. 3H-3I). The lack of epidermal role of NIN was recently reported for crack-entry legume Arachis hypogaea where the author claimed that NIN only has an organogenesis role (Bhattacharjee et al., 2022).

### Datisca NIN Promoters Respond to Exogenous LCO Treatment

[0165] Clade 2 Frankia are the only group of Frankia that have retained the nod cassette and are capable of producing the chitin based signaling molecule (Nguyen et al., 2016). To investigate whether the D. glomerata responded to lipo-chitooligosaccharide (LCO) signaling molecules, hairy-root transformed plants carrying pDgNIN:GUS and pDgNIN2:GUS were transiently treated with LCO molecules. pDgNIN:GUS control roots treated with water did not show any staining (FIG. 4A). 24 hours post treatment with 10⁻⁷M S-LCO (sulphated-LCO) and 10⁻⁷M C04 roots showed intense staining in the root vasculature and near the root tip (FIGS. 4C-4D, 4K), as compared to no staining observed for 10⁻⁷M NS-LCO (nonsulphated-LCO) and 10⁻⁷M C08 (FIGS. 4B, 4E). pDgNIN2:GUS also did not show any staining under control treatment (FIG. 4F). As compared to pDgNIN:GUS, however, pDgNIN2:GUS did show staining in the 10⁻⁷M NS-LCO treatment (FIG. 4G) but did not show staining in the 10⁻⁷M C04 (FIG. 4I). The consistent staining in the 10⁻⁷M S-LCO indicated that the S-LCO was possibly a more preferred signaling molecule to trigger the NIN dependent symbiotic pathway in D. glomerata (FIGS. 4C, 4H). Surprisingly, however, the spatial distribution of the GUS staining for pDgNIN2:GUS was mostly in the root elongation zone with no staining in the vascular bundle (FIGS. 4G, 4H, 4K). This difference in expression profile for the two DgNINs was consistent to what was previously observed with Frankia (FIGS. 2A-2J). Similar to pDgNIN:GUS, 10⁻⁷M C08 failed to induce any NIN expression in plants with the pDgNIN2:GUS construct (FIG. 4J). Thus, it can be concluded that pDgNIN and pDgNIN2 were induced symbiotically both in the presence of Frankia and with the chitinous signaling molecule. More importantly, the duplication event led to neofunctionalization of the NINs, leading to different expression pattern in the paralogs.

### Downregulation of Datisca NIN Abolishes Nodule Development.

[0166] It is important to investigate the actual role of NIN during nodulation in D. glomerata, including establishing the spatiotemporal involvement of NIN during the intercellular actinorhizal nodule development. RNAi constructs targeting both DgNIN and DgNIN2 were designed and transformed into the hairy roots of D. glomerata eight weeks after infection with a cocktail of clade 2 Frankia Dg1 and Dg2. None of the transformed roots in DgNIN_RNAi plants (verified by the presence of the eGFP as the transformation marker) showed any formation of root nodule as compared to empty vector transformed hairy roots (FIGS. 5A-5D). While the empty vector transformed roots formed a median of 2 nodules per root (n=40), all the DgNIN_RNAi roots (n=100) were devoid of any visible nodule. It is important to note that the non-transformed roots in case of empty vector (n=28) and DgNIN_RNAi (n=70) formed nearly comparable and non-zero amounts of nodules per root (FIG. 5A). The significant reduction of nodule number in case of DgNIN_RNAi clearly indicates its importance in the nodule development process. At the same time, the formation of nodules in the non-transformed roots indicates the absence of any trans effect of the RNAi construct on the plant health. The importance of NIN in legume nodule development in well-established from the previous work in model legumes like M. truncatula and L. japonicus where the nin1 knockout mutant showed a strong nod-phenotype (Marsh et al., 2007; Schauser et al., 1999). In certain DgNIN_RNAi transformed roots (˜10%) there were some cluster root like structures present which were not noted in any of the empty vector transformed roots (FIGS. 5E-5F). The downregulation of the DgNIN and DgNIN2 were confirmed by real-time PCR against control transformed roots and nodules where the DgNIN_RNAi roots showed ˜90-100-fold reduction of DgNIN and DgNIN2 respectively in 3 out of the 4 independent root system tested. In soybean, RNAi of GmNIN1a and CRISPR of multiple NINs also resulted in complete abolishment of nodule development with severe reduction in expression level (Fu et al., 2022). Thus, it can be concluded that the lack of nodulation in DgNIN_RNAi transformed roots is directly related to the severe reduction in the expression level of NINs.

### Overexpression of NIN Abolished Nodulation and Resulted in Formation of Abnormal Structures.

[0167] Previous work in model legumes showed that while overexpression of NIN can lead to spontaneous nodule organogenesis, it can also have a negative impact on infection, leading to empty nodule formation (Fu et al., 2022; Soyano et al., 2014). To check whether the impact of NIN overexpression on nodule development was also true for actinorhizal nodule organogenesis, DgNIN and DryasNIN were overexpressed under the pLotusUBI (pLjUBI) promoter. The pLjUBI promoter was checked for its activity in the Datisca hairy roots where it showed intense GUS staining, confirming its efficacy for overexpression experiments (FIG. 6A). The pLjUBI-DgNIN (FIGS. 7D-7F), pLjUBI-DgNIN2 (FIGS. 7G-7I), and pLjUBI-DryasNIN (FIGS. 7J-7L) were transformed into the hairy roots of D. glomerata and roots were scored 2 weeks after transfer to soil (2WTS) (control, FIGS. 7A, 7D, 7G, and 7J) and eight weeks after infection with clade 2 Frankia Dg1 (FIGS. 7B-7C, 7E-7F, 7H-7I, and 7K-7L). Overexpression of each of the DgNIN, DgNIN2, and DryasNIN resulted in formation of a huge callus like structure with many small bumps resembling either a trapped lateral root or an immature nodule primordium (FIGS. 7A, 7D, 7G, 7J, and 7O-7Q), as compared to normal root development observed for the empty vector construct (FIGS. 7M-7N). A minority (˜20%) of these plants formed non-transformed roots which were fundamental for their survival as the abnormal structures failed to produce healthy roots that could sustain the plant. Spontaneous nodule like structures were previously observed for NIN overexpression in legumes like M. truncatula, L. japonicus, and G. max (Fu et al., 2022; Soyano et al., 2013; Vernid et al., 2015). Unlike in legumes, however, where the overexpression resulted in formation of nodule like-structures, in D. glomerata the overexpression of actinorhizal NIN resulted in complete disruption of the normal root development.

[0168] The NIN overexpressing plants were transferred to soil and, following infection with clade 2 Frankia Dg1, roots were harvested eight weeks after infection (FIGS. 7B-7C, 7E-7F, 7H-7I, 7K-7L, and 7M-7N). While the non-transformed roots did produce nodules along with the control transformed roots (FIG. 7N), no proper nodule formation was detected on the transformed roots. Half-section of the structures showed the presence of significant amount of vascular proliferation and uninfected regions due to rapid cell division (FIGS. 7C, 7F, 7I, and 7L). In L. japonicus, overexpression of NIN suppressed nodule development by inducing the AON pathway (Soyano et al., 2014). Although there is no evidence of a functional AON pathway operating in actinorhizal plants, the lack of proper nodule development under NIN overexpression in D. glomerata suggested that it might be functional. From some of the callus-like structure in plants transformed with pLjUBI-DryasNIN, there was formation of extremely fat primordia-like structures on very small lateral roots (FIG. 7K). Very similar structures were also noted for GmNIN overexpression in soybean (Fu et al., 2022). On the other hand, half-section of the structure in pLjUBI-DryasNIN revealed the presence of several trapped primordia-like structures which did not manage to grow (FIG. 7L). As actinorhizal nodules are ontologically closer to lateral root development, these data indicated that the regulation of NIN expression is vital in controlling the homeostasis between lateral root development and nodule development.

### Actinorhizal NIN can Complement the Medicago Mutant Nin1.

[0169] A cytokinin responsive element sitting several thousand base pairs upstream to the transcriptional start site (TSS) of the legume NIN was found to be indispensable for the rescue of the nin1 mutant in M. truncatula (J. Liu et al., 2019). To check whether there is cross-species conservation of the NIN protein function, rescue of the nin1 mutant was tested by hairy root transformation using the synthetic M. truncatula NIN promoter driving the DgNIN and DryasNIN. As a readout of the rescue efficiency, infection thread phenotype and the nodule organogenesis were scored (FIG. 8A). While the nin1 mutant transformed with the empty vector rarely showed formation of infection curl (˜5-7%), the pMtNINsyn:MtNIN transformed roots showed significantly higher numbers of infection curl, as well as extended infection threads that reached the epidermal layer and in some cases infection patches where the infection thread failed to extend beyond the epidermal layer (FIGS. 8B-8E and 8O). The pMtNINsyn:MtNIN transformed nin1 roots also managed to rescue nodulation but the number of nodules were significantly less than the A17:Empty vector (FIGS. 8F and 8P). The inability to match the A17 level of nodulation efficiency after rescue of nin1 mutant was previously reported during other experiments (Vernie et al., 2015). As compared to pMtNINsyn:MtNIN, pMtNINsyn:DgNIN produced significantly higher number of infection curls accompanied by lesser number of extended infection thread and infection patch (FIGS. 8G-8I and 8O). Concomitantly, the number of nodules formed on the transformed roots was also significantly less indicating the lesser efficiency of the D. glomerata NIN in rescuing nodule organogenesis (FIGS. 8J and 8P). On the other hand, pMtNINsyn:DryasNIN turned out to be almost equally efficient as the pMtNINsyn:MtNIN for the infection phenotype and during the nodule organogenesis (FIGS. 8K-8P). The efficiency of the Dryas NIN in rescuing the phenotype of the nin1 mutant indicated the functional conservation of the NIN protein. The ability of the actinorhizal NIN in the rescue of the nin1 mutant was demonstrated for the Casuarina NIN (Clavijo et al. 2015).

### Presence of Auxin Responsive Elements in the NIN Promoter Indicate its Ancestral Regulation.

[0170] During nodule organogenesis, cytokinin is responsible for inducing the flavonoid biosynthesis pathway which act as a natural auxin transport inhibitor (Ng et al., 2015). The local increase in auxin concentration is vital for inducing de novo cell division and kick starting the organogenesis process in the pericycle and cortical cells (Kohlen et al., 2018a; Rightmyer & Long, 2011). Cytokinin is responsible for the induction of NIN through the cytokinin responsive elements in the promoter of NIN which are conserved in the legumes (J. Liu et al., 2019). Promoter analysis of the actinorhizal genomes failed to show the presence of any putative cytokinin elements homologous to the legumes. This is in concomitance with the previous report where the absence of any cytokinin element was confirmed in the Parasponia NIN promoter (J. Liu & Bisseling, 2020). As the actinorhizal nodule development shares homology with lateral root development where auxin plays an important role (Ibáñez et al., 2017; Pawlowski & Demchenko, 2012), the role of auxin in the expression of NIN in D. glomerata was investigated. 10 days post treatment (10 DPT) with 100⁻⁶M NAA (1-naphthalene acetic acid) a ˜4-fold and ˜12-fold increase in the expression of DgNIN and DgNIN2 was detected as compared to the control treated root samples (FIG. 9A). Similar exogenous treatment with auxin analogues such as IBA (Indole-3-butyric acid; FIG. 9B), 2,4D (2,4-Dichlorophenoxyacetic acid; FIG. 9C) and NAA (1-Napthaleneacetic acid; FIG. 9D) showed differential activation of MtNIN expression. M. truncatula treatment with 0.1μ M after 16 hours and 1 μM after 2 days resulted in ˜3-fold change in expression of MtNIN as compared to control treated roots (FIGS. 9B-9D). To understand whether the auxin dependent expression of NIN is conserved across the nodulating clades, the actinorhizal and legume NIN promoters were investigated to looked for putative auxin responsive elements (AuxREs). To do this analysis, the region between the Cyclops binding site (CycBS) and the transcriptional start site (TSS) was considered for all nodulating NINs (FIG. 9E). Previous study of AuxREs in the Arabidopsis genome indicated the prevalence of active AuxREs in the 5′UTR until −2kb upstream of the TSS (Mironova et al., 2014). Even though some of the CycBS in actinorhizal NIN promoter are further than −2kb, these were still included in the analysis (FIG. 9E). For the AuxRE motif search TGTCTC and TGTCTN (except C) were used, where the former is the canonical AuxRE and the latter is the motif which has been shown for ARF2/5 binding (Marchive et al., 2013; Ulmasov et al., 1997; Y. Zhang et al., 2015). A cumulative analysis of the legumes and the actinorhizal NIN promoter indicated the presence of a distinct peak closer to the CycBS and another peak closer to the TSS which was more prominent in legume and much more diffused for the actinorhizal plants (FIG. 9E). Among the actinorhizal clade Rosales which include Rosaceae plant D. drummondii and Cercocarpus sp. and Rhamnaceae plants like Ceanothus and Ochetophila showed more putative AuxRE as compared to other intercellular actinorhizal clade of Cucurbitales (FIG. 9F). Among the Fagales, Alnus from Betulaceae showed more putative AuxREs as compared to Casuarina from Casuarinaceae. Within Fabales, the Viciod clade which include M. truncatula and C. arietinum, Lotea represented by L. japonicus, and Phaseoleae represented by Vigna, Cajanus and Glycine showed more putative AuxREs compared to Arachis (Dalbergeae) and Lupin (Genisteae) (FIG. 9F). Parasponia also showed very few AuxREs, indicating that intercellular rhizobial entry nodulating plants showed a smaller number of the AuxREs motifs in the NIN promoter.

### Synthetic Auxin Responsive Promoter-Driven NIN can Induce Spontaneous Nodule-Like Structures.

[0171] The presence of the auxin responsive hexameric motif is not sufficient to determine its efficacy during the transcriptional process, and analysis in Arabidopsis showed that only 50% of the predicted genes responded to exogenous auxin treatment (Freire-Rios et al., 2020). To check the role of auxin in NIN activation during actinorhizal nodule development, DgNIN and DryasNIN were ectopically expressed using the synthetic auxin responsive promoter pDR5 in the hairy roots of D. glomerata (FIG. 10A). pDR5:GUS is active during the lateral root development in D. glomerata and also during nodule development (FIGS. 11A-11B). The pDR5:GUS activity could only be detected at the nodule meristem, however (FIG. 11B), reconfirming what was previously published for D. glomerata (Demina et al., 2019). Unlike overexpression of NIN which resulted in formation of a callus like-structure (FIGS. 7A, 7D, 7G, and 7J), pDR5:DgNIN and pDR5:DryasNIN resulted in formation of spontaneous nodule like-structures referred to herein as bumps (FIGS. 10D, 10H, and 10J). While under control condition the number of bumps in plants with pDR5:DryasNIN was significantly higher than plants that received the empty vector control, post infection with clade 2 Frankia Dg1 plants expressing NIN from either construct had significantly higher number of bump formation than plants that received the empty vector control (FIGS. 10F, 10H, and 10L). This is in concert with the fact that Frankia produce auxin during the infection process which could affect the sensitivity of the DR5 promoter driving NIN (Hocher et. al., 2011). Apart from the bump, there was also formation of cluster root like-structures in pDR5:DryasNIN where the lateral roots cluster together with complete loss of spatial distribution (FIGS. 101 and 10K). While such cluster root also formed on the Empty vector and pDR5:DgNIN roots under control condition, the number of such structure was significantly higher in pDR5:DryasNIN (FIGS. 10E, 10I, 10K, and 10L). Post infection the prevalence of cluster root formation was very low in pDR5:NIN transformed roots, and proper healthy nodule formation was visible in the adjoining roots (FIGS. 10G, 10M, and 10N). Previously, cluster root formation was observed in Lupin under phosphate (P) starved conditions as an adaption to acquire nutrients (Wang et al., 2013). Although cluster roots were never previously observed in D. glomerata, it could be possible that the influence of pDR5:NIN coupled with nutrient-deprived condition induced such structures. This is in concomitance with the fact that cluster root formation can be induced under the influence of auxin (Gilbert et al., 2000; Skene, 2001). Thus, this result indicated that during intercellular actinorhizal nodule development in D. glomerata, auxin orchestrated the expression of NIN to drive the organogenesis program.

Synthetic Auxin Responsive Promoter-Driven NIN Results in More Infection Events in M. truncatula.

[0172] Plants need to alter their gene expression profile to respond to changing environmental cues. Previous evidence in salt stress tolerance shows that plants prefer to have conserved trans-regulators but evolutionarily divergent cis-regulatory sequences (Wu et al., 2021). In order to find whether the AuxREs that are present in the NIN promoter are evolutionarily conserved in controlling NIN expression, pDR5:NIN from M. truncatula and D. drummondii were introduced into the hairy-roots of the M. truncatula nin1 mutant. As a control, the hairy-roots were also transformed with pMtNINsyn:MtNIN and pDryasNIN 5kb:DryasNIN (FIGS. 12A-12J). 4WAI with S. meliloti 2011-eGFP, the pMtNINsyn:MtNIN formed nodules that were evident from the eGFP fluorescence driven by an nifH promoter (FIGS. 12A-12B), but none of the other constructs produced any nodules (FIGS. 12C-12J). pDryasNIN_Skb:DryasNIN also could not to rescue the nodulation in the nin1 mutant, with nodules forming in rare cases (FIGS. 12C, 12D, and 12J). Although previously identical expression patterns were visible for the pDryasNIN_5kb and pMtNINsyn constructs (FIGS. 3A-3I), the inability of the pDryasNIN promoter to rescue nodulation indicated the importance of its missing cytokinin responsive elements. However, the hairy roots did show the presence of infection threads that managed to reach the epidermal layer, with some even forming infection patches (FIGS. 12C-12D). The ability of the pDryasNIN 5kb:DryasNIN to induce epidermal infection threads is consistent with what had previously been observed for pMtNIN_Skb:MtNIN where the CycBE (Cyclops Binding element) was responsible for the epidermal infection thread progression (J. Liu et al., 2019). On the other hand, the pDR5:MtNIN and pDR5:DryasNIN both resulted in formation of significantly higher numbers of infection curls which rarely managed to reach the epidermal layer (FIGS. 12E-12I). Unlike in D. glomerata where the pDR5:DryasNIN and pDR5:DatiscaNIN resulted in spontaneous nodule like structure formation (FIGS. 10D-10E and 10J-10K), no nodule-like structure formation was detected in M. truncatula. To investigate the possible reason behind the discrepancies in the phenotypic effect, the expression level of pDR5 was assayed in the A17 wild-type background and in the nin1 mutant background (FIGS. 11C-11J). Under control conditions pDR5:GUS was active throughout the root system in both A17 and the nin1 mutant, with significantly higher expression in the root tips (FIGS. 11C, 11E, 11G, and 11I). But post infection, the pDR5:GUS expression level in the nin1 mutant was significantly less in than the A17 wild-type, where the auxin signaling is active both in the vascular bundle as well as the nodule meristem (FIGS. 11D, 11F, 11H, and 11J). This agrees with the previous observation that post infection the NIN is responsible for auxin production by activating auxin biosynthesis genes like LBD16 and YUCCA (Schiessl et al., 2019; Shrestha et al., 2021). As the A17 background provided ample auxin induction, the introduction of the pDR5:MtNIN, pDR5:DryasNIN, and pDR5:DatiscaNIN all resulted in the formation of significantly higher numbers of nodules developing possibly due to significantly higher number of infection events by eight weeks after infection (FIGS. 13A-13H, 13Q, and 13R). This was confirmed in the A17:Enod11-GUS background as well where infection patches with higher number of infection threads were seen (FIGS. 13I-13P). Thus, AuxREs are active in the NIN promoter but, unlike in the D. glomerata actinorhizal system where the AuxRE is controlling the organogenesis pathway, in M. truncatula its role is primarily to control the infection process.

### The Auxin Responsive Element in the Medicago NIN Promoter is Essential for Infection Progression.

[0173] Epidermal auxin induction played a vital role in the infection progression in M. truncatula with a mutation in auxin transporter AUX1 affecting nodule development (Roy et al., 2017). At the same time epidermal induction of NIN is essential for infection progression and induction of cytokinin signalling in the cortex (Vernié et al., 2015). To check whether the auxin responsive elements (AuxRE) in the pMtNIN were essential for coordinating the infection mechanism by controlling the NIN expression, a mutated version of the promoter called pMtNINsynAuxREmut was synthesized (FIG. 14V). In this promoter the three potentially conserved AuxRE sites were mutated while retaining the canonical CycBE and cytokinin responsive elements. pMtNINsynAuxREmut driving MtNIN transformed into M. truncatula nin1 mutant hairy roots showed formation of white nodule with infection patches as compared to proper nodule development observed for non-mutated pMtNINsyn:MtNIN (FIGS. 14A-14B, 14F-14G, and FIG. 14U). At the early stages of infection, pMtNINsynAuxREmut:MtNIN resulted in formation of more infection curls as compared to pMtNINsyn:MtNIN (FIGS. 14E, 14J, and 14U). The lack of significant difference in the formation of extended infection thread between the constructs suggest that early infection is not affected by the mutation of AuxRE (FIGS. 14C-14D, 14H-14I, and 14U). It could be possible that epidermal progression of infection thread requires a threshold of NIN expression which is in turn dependent on auxin accumulation.

[0174] Provided the fact that NIN was already known to activate auxin biosynthesis pathways by activating LBD16 expression (Schiessl et al., 2019b; Soyano et al., 2019), auxin accumulation was checked in the transformed hairy roots of M. truncatula nin1 mutants. Constructs carrying pMtNINsyn:MtNIN-pDR5:GUS and pMtNINsynAuxREmut:MtNIN-pDR5:GUS were transformed in M. truncatula nin1 mutants and nodulation was scored four weeks post infection. The pMtNINsyn:MtNIN-pDR5:GUS construct rescued nodulation and showed auxin accumulation both at the early stage of infection and mature nodule development (FIGS. 14L-14M). In comparison, pMtNINsynAuxREmut:MtNIN-pDR5:GUS resulted in nodules with infection thread on its apex and lack of early or late accumulation of auxin substantiated by low pDR5:GUS activity (FIGS. 14N-140). The lack of pDR5 activity in the pMtNINsynAuxREmut:MtNIN roots indicated the reduction in auxin accumulation which in turn affected the MtNIN expression. Interestingly, however, while the infection progression was affected by the AuxRE mutation, the roots still were able to form nodules, suggesting the cortical activity of NIN was unaffected.

[0175] NIN negatively affects ENOD11 expression by competing with ERN1 in the epidermis (Xie et al., 2012). To confirm the lack of epidermal activation of MtNIN, the pENOD11:GUS expression was scored in M. truncatula nin1-pENOD11:GUS lines. Hairy-root transformed Mt nin1-pENOD11:GUS plants showed more localized epidermal expression of pENOD11:GUS in pMtNINsyn:MtNIN as compared to diffused epidermal expression in pMtNINsynAuxREmut:MtNIN transformed roots (FIGS. 14Q and 14S). MtENOD11:GUS expression was noted in the distal end of a mature M. truncatula nodule, comprising the infection zone (Journet et al., 2001). Concomitant pENDO11:GUS expression was noted for pMtNINsyn:MtNIN transformed nodules as compared to a more diffused signal in the pMtNINsynAuxREmut:MtNIN primordia, indicating the lack of infection progression (FIGS. 14O and 14T). Thus, it was confirmed that the AuxRE present in the pMtNIN were essential for maintaining an auxin dependent NIN flux controlling the infection mechanism.

Synthetic Auxin Dependent Promoter-Driven Dryas NIN can Induce Nodule-Like Structure in Fragaria vesca.

[0176] NLPs are responsible for the nitrate responsive lateral root development by directly affecting lateral root organogenesis or by interacting with other factor affecting root formation (Fan et al., 2019; Guan et al., 2017; K. H. Liu et al., 2022). NIN belongs to the NLP clade where it diverged from the NLP1 and, with the loss of the nitrate sensing domain, neofunctionalized to become a regulator of nodulation in the legumes (Suzuki et al., 2013). Previously, overexpression of DgNIN, DgNIN2, and DryasNIN resulted in formation of proliferating structures in the root (FIGS. 7A-7L). Overexpressing DryasNIN in strawberry was therefore tested to see whether it could induce spontaneous cell division in the root. However, attempts to regenerate any shoot from the callus were unsuccessful, and the explants died after some time (Table 5). Similar problems were faced with overexpressing MtNIN in strawberry using an inducible system (Table 5). To investigate the problem further, N-terminal tagged Staygold-MtNIN was overexpressed in Nicotiana leaves (FIGS. 15A-15E). 3 days post infiltration the leaves started to show senescence (FIG. 15A), which was not present in leaves infiltrated with the control construct which did not carry the MtNIN cassette (FIG. 15B), or leaves infiltrated with helper plasmid p19 (FIG. 15C). It was concluded that overexpression of any form of NIN was toxic for the non-nodulating plants.

TABLE 5
Transformation efficiency in strawberry HAWAII4.

| | Number of | Number of calli |
|---|---|---|
| | transformed | with shoots |
| Construct | explants | obtained |
| pLjUBI-GUS-tNOS-p35S- | 50 | 40 |
| mCherry-t35S | | |
| pLjUBI-DdNIN-3xMyc-trbcs- | 50 | 0 |
| p35S-mCherry-t35S | | |
| pDR5-DdNIN_cDNA-tNOS- | 50 | 21 |
| p35S-mCherry-t35S | | |
| pL2B-Kan-pGal-MtNIN-35S- | 38 | 0 |
| pLjUBI-GVG-t35S | | |
| pL2B-Kan-pGal-GUS-t35S- | 38 | 9 |
| pLjUBI-GVG-t35S | | |

[0177] To circumvent the toxicity of NIN overexpression and the possibility of auxin-driven NIN inducing organogenesis in D. glomerata, stable transgenics of diploid strawberry with pDR5:DryasNIN were raised for investigation. To assess the efficacy of the pDR5 promoter in diploid strawberry, stable lines expressing pDR5:GUS were also produced. Dryas NIN was used because D. drummondii is one of the closest nodulators to strawberry, which has experienced loss of nodulation due to loss of NIN (Griesmann et al., 2018). Under the control condition (+N+P) pDR5:GUS showed bright staining in the matured root tip and also at the emerging lateral root (LR) primordia (FIG. 16A). Exogenous treatment with auxin analogue NAA (100⁻⁶M 1-naphthalene acetic acid) resulted in non-specific expression throughout the root system indicating loss of spatial distribution of auxin response (FIG. 16B). Previous evidence mostly in Arabidopsis shows that nitrate level plays an important role in LR development (H. Zhang & Forde, 1998). This LR development is in turn controlled by a passive feedforward mechanism involving auxin signaling pathway (Vidal et al., 2010). Nitrogen (N) starvation of strawberry plants resulted in activation of the auxin signaling pathway which is evident from the intense GUS staining of the roots (FIG. 16C). Under the N limiting (−N+P) condition the vascular bundle and the entire lateral root primordia shows GUS staining, highlighting the heightened auxin signaling (FIG. 16C). Exogenous auxin treatment under the N limiting condition resulted in a complete spatial shift in the auxin response. Unlike any of the individual conditions previously observed for +N+P+NAA (FIG. 16B) or −N+P (FIG. 16C), −N+P+NAA resulted in localized GUS staining in the bump like structures (FIG. 16D). A very similar spatial shift in the GUS staining profile was also observed under phosphate (P) limiting condition post auxin treatment (FIGS. 16E-16F). P starvation was directly linked with lateral root formation with the activation of auxin signaling pathway (Crombez et al., 2019). Thus, these data established that nutrient limiting condition coupled with auxin treatment can differentially activate the auxin signaling pathway in strawberry.

[0178] The strawberry transgenic lines expressing pDR5:DryasNIN were treated with auxin under both N and P limiting condition as well as repleted condition for 4 weeks (FIGS. 17A-17M). Under the +N+P+NAA condition, the pDR5:DryasNIN lines (FIGS. 17G-17H) showed formation of numerous bump-like structures on the roots which were significantly higher (FIG. 17M) than the control transformed lines (FIGS. 17A-17B). The structures were more round as compared to the similar bump-like structures formed on the control transformed lines indicating a change in the development of these structures (FIGS. 17B and 17H). The N limiting and P limiting condition induced more lateral root formation (FIGS. 17N-170). Under the −N+P+NAA and +N−P+NAA condition similar induction of the bump-like structures was observed, and in pDR5:DryasNIN line 4 both were significantly higher as compared to +N+P+NAA condition (FIG. 17M). Under the effect of NAA treatment under all the nutrient condition pDR5:DryasNIN lines produced significantly higher numbers of bump-like structures which often resemble nodule-like structures (FIGS. 17C-17F and 17I-17M). Auxin treatment did have a negative effect on the total number of elongated lateral roots as compared to the untreated condition (FIG. 17N). It is very likely that the reduction in the elongated lateral root is compensating for the number of bump-like structures formed on the root upon auxin treatment. It is noteworthy that even under control condition pDR5:DryasNIN lines had fewer LR as compared to the control lines (FIG. 17N). But there was not much significant difference in the density of the LRs (FIG. 17O), indicating that the primary root lengths of the pDR5:DryasNIN lines were shorter than in the control lines. Thus, this established that in a non-nodulating plant like strawberry, expression of NIN in the presence of auxin can induce organogenesis of nodule like structures (NLS).

Ultrastructure Analysis of the NLS in Strawberry Indicates their Change in the Fate Map.

[0179] Auxin and cytokinin both play pivotal roles during nodulation where auxin is primarily responsible for inducing neocortical cell division (Kohlen et al., 2018b; Ng et al., 2015). In a recent report it was also found that the role of cytokinin in inducing spontaneous nodule formation is restricted to legumes and it has no effect on the actinorhizal plants (Gauthier-Coles et al., 2019). On the other hand, it was determined that auxin responsive NIN could induce spontaneous nodule like structures in D. glomerata (FIGS. 10A-10N). Closer examination of the NLS in the pDR5:DryasNIN lines indicated that the total size of the structures was significantly higher as compared to the control lines (FIGS. 18A-18S). While even the control lines produced some NLS resembling the ones observed in the pDR5:DryasNIN lines, they are significantly fewer in number and more importantly they never formed merged structures (FIGS. 18B, 18E, and 18H, compared to 18K, 18N, and 18Q). The formation of the merged structures indicated a spatial loss of the lateral root patterning mechanism. Ultrastructure analysis of the structures showed the presence of elaborate vascular bundles which were often diffused and at other times peripheral (FIGS. 18L, 18O, and 18R). The presence of the peripheral vasculature was quite significant as the NLS in the control lines are mostly central and rarely form some diffused vasculature (FIGS. 18C, 18F, and 18I). Formation of diffused vasculature in the spontaneous nodule like structures was previously reported in M. truncatula (Rightmyer & Long, 2011). It is very likely that the peripheral vascular bundle observed in the pDR5:DryasNIN lines indicated a change in the fate map of these structures where they cease to have the lateral root identity due to the presence of NIN.

Identifying Hallmarks for Proto-Nodule Through Transcriptomic Analysis of NLS in pDR5:DryasNIN Lines of Strawberry.

[0180] The NLS formed on the strawberry roots of pDR5:DryasNIN lines following auxin treatment were novel structures. To investigate whether these structures had any molecular identity of a nitrogen fixing nodule, transcriptomic analysis was done with total RNA extracted from the root under different conditions. A collinearity was seen between the structures formed in the strawberry root and the expression of DryasNIN (FIGS. 19A-19B). Differentially Expressed Genes (DEGs) were identified by contrasting the RNAseq data from the pDR5:DryasNIN lines to the control lines under the 4 different conditions: +N+P, −N+P, +N+P+NAA, and −N+P+NAA. A volcano plot showed that under +N+P and −N+P conditions there were not many DEGs (FIG. 20A-20B). On the other hand, the +N+P+NAA condition showed 206 up-regulated and 206 down-regulated genes (FIG. 20A). The −N+P+NAA condition showed 243 up-regulated genes, as compared to only 6 downregulated genes. 87 DEGs were found to be represented in both +N+P+NAA and −N+P+NAA conditions, indicating their independence of the N status (FIG. 20B).

[0181] Gene set enrichment analysis indicated that the DEGs under NAA conditions represented certain metabolic pathways (FIG. 20C), of which the most significant are the Jasmonic acid biosynthesis, Zeatin biosynthesis, and ethylene biosynthesis pathways, which are affected under both +N+P+NAA and −N+P+NAA conditions (FIG. 20C). Comparatively, under the −N+P+NAA condition DEGs affecting the sterol biosynthesis and heme biosynthesis were notable. In both cases, genes upstream in the pathway were significantly upregulated (FIG. 20C).

[0182] To understand the significance of the DEGs in the roots with NLS in strawberry, the available transcriptomes of M. truncatula were analyzed, including: Mock vs Myc—DEGs activated during mycorrhization; Lateral root—DEGs involved in lateral root development; Nodulation—spot inoculation with S. meliloti; Spontaneous nodulation mutant—NIN overexpression; and spd1 (spontaneous nodule development) susceptible zone (FIGS. 21A-21C). These datasets were selected to identify the metabolic pathways that are affected during mycorrhization (Mock vs Myc), organogenesis (Mock vs Myc and nodulation), root organ development (lateral root development and nodulation), and nodule organogenesis devoid of infection (spontaneous nodulation in NIN overexpression and spd1). Gene set enrichment analysis showed that there were multiple pathways that were commonly represented between the above-mentioned conditions and strawberry NLS data (+N+P+NAA and −N+P+NAA) (FIGS. 22A-22B). The most significant of these pathways include Terpenoid biosynthesis, Monolignol biosynthesis, Sterol biosynthesis, Jasmonic acid biosynthesis, and Heme biosynthesis pathways (FIG. 22B). Of these, the Sterol, Jasmonic acid, and Heme biosynthesis pathways are common for lateral organ development and spontaneous nodulation. Thus, from the comparative transcriptomic analysis a certain signature was determined that could justify the unique proto-nodule identity of the NLS structures in strawberry.

### Example 2: Dryas NIN was Able to Induce Organogenesis in Barley with Auxin Treatment

[0183] The following example describes assays to test the effects of pDR5:DdNIN in barley.

### Materials and Methods

[0184] The experiments described in this Example are performed as described in Example 1 unless otherwise noted.

### Barley Stable Lines

### A. Plant Growing Conditions

[0185] Barley (Hordeum vulgare L. cv. Golden Promise) were raised using A. tumefaciens-mediated transformation (Bartlett et al., 2008). Barley seeds were treated with 70% ethanol for 2 minutes, followed with three times wash in sterile water. The seeds were then surface sterilized by 5% sodium hypochlorite solution for 4 minutes and rinsed with sterile water 4-5 times. The sterilized seeds were plated on 1% water agar plates and imbibed at 4° C. for 3 days, then germinated in the dark at 22° C. for 2-3 days (Li et al., 2022). STARTS transgenics were raised using A. tumefaciens-mediated transformation (Imani et al., 2011).

### B. Hormone Treatment of Barley

[0186] Tissue culture STARTS plants were grown in rooting media for approximately 4 weeks after transfer, and barley seeds were grown on water-agar plates for seven days after germination, after which seedlings were transferred to 1% Hoagland's media plates. Seedlings were treated under control conditions, nitrogen deficient conditions, and each of the above in combination with the addition of exogenous auxin analogue NAA (100⁻⁶M 1-naphthalene acetic acid), 0.8% agarose (Sigma). The root portion of the plates was covered with aluminum foil. The plants were maintained under a 16 h-day and 8 h-night cycle at 24-22° C. Tissue was harvested four weeks after treatment for phenotyping and RNA extraction.

Phenotypic Analysis—H. vulgare Whole Transgenics and STARTS

[0187] Whole plants were imaged using a stereo microscope DX105 F (Leica) using LAS 3.4 software.

### Results and Discussion

[0188] Auxin treatment was reported to induce nodule like-structures (NLS) in rice (Hiltenbrand et al., 2016). Since it was established in the strawberry system that expressing pDR5:DryasNIN could form NLS with some proto-nodule identity under the influence of auxin, lines in barley (Hordeum vulgare var Golden promise) were raised with the same cassette. To establish the efficacy of the pDR5 promoter in barely system, some transgenics were also raised with pDR5:GUS and pDR5:NLS-eGFP (FIGS. 23A-23F, 24A-24J). In comparison to overexpressing pOsUbi:GUS, pDR5:GUS expression under control condition was very weak (FIGS. 23B-23C). However, with 100 μM NAA (auxin) treatment GUS staining was visible in the bump-like structures (FIGS. 23E-23F), indicating its responsiveness to auxin treatment. The GUS staining pattern was corroborated by the pDR5:NLS-eGFP data where eGFP localization could be seen in the nucleus after 50 μM 2,4D (auxin) treatment (FIGS. 24A-24J, top sections).

[0189] Having established the auxin responsiveness of the pDR5 promoter, the pDR5:DryasNIN barley lines were treated with auxin (100 μM NAA) under both N repleted (+N+P+NAA) and depleted (−N+P+NAA) conditions (FIGS. 25A-25O). It is important to note that the TO and T1 lines with pDR5:DryasNIN showed the formation of NLS after 4 weeks of treatment (FIGS. 25G-25O). Ultrastructure analysis of the NLS showed the presence of multiple vascular bundles that were often peripheral as compared to a more central vasculature in the bump-like structure of control plants (FIGS. 25A-25F compared to FIGS. 25G-25O). The formation of the NLS indicated the cross species potential of the pDR5:DryasNIN in inducing NLS.

### Example 3: Spatiotemporal Expression Pattern of DgNIN2 During Intercellular Actinorhizal Nodule Development

[0190] The following example describes the spatiotemporal expression pattern of Datisca glomerata NIN2 during intercellular actinorhizal nodule development.

### Materials and Methods

[0191] The experiments described in this Example are performed as described in Example 1 unless otherwise noted.

### Results and Discussion

[0192] To check whether there is any conservation in the expression pattern of the NIN2 promoter between legume and actinorhizal plants, the pDgNIN2_5kb:GUS is also transformed into the hairy root of M. truncatula A17 plants, and expression of GUS is assayed.

### Example 4: Complementation Assay of Actinorhizal DgNIN2 for Medicago Mutant Nin1

[0193] The following example describes assays to assess the ability of DgNIN2 to complement the Medicago nin1 mutant.

### Materials and Methods

[0194] The experiments described in this Example are performed as described in Example 1 unless otherwise noted.

### Results and Discussion

[0195] To check whether there is cross-species conservation of the NIN protein function, rescue of the nin1 mutant is tested by hairy root transformation using the synthetic M. truncatula NIN promoter driving the DgNIN2. As a readout of the rescue efficiency, infection thread phenotype and the nodule organogenesis are scored.

### REFERENCES

[0196] Bartlett, J. G., Alves, S. C., Smedley, M., Snape, J. W., & Harwood, W. A. (2008). High-throughput Agrobacterium-mediated barley transformation. Plant Methods, 4(1).
[0197] Bertioli, D. J., Cannon, S. B., Froenicke, L., Huang, G., Farmer, A. D., Cannon, E. K. S., Liu, X., Gao, D., Clevenger, J., Dash, S., Ren, L., Moretzsohn, M. C., Shirasawa, K., Huang, W., Vidigal, B., Abernathy, B., Chu, Y., Niederhuth, C. E., Umale, P., . . . Ozias-Akins, P. (2016). The genome sequences of Arachis duranensis and Arachis ipaensis, the diploid ancestors of cultivated peanut. Nature Genetics, 48(4), 438-446.
[0198] Bhattacharjee, O., Raul, B., Ghosh, A., Bhardwaj, A., Bandyopadhyay, K., & Sinharoy, S. (2022). Nodule INception-independent epidermal events lead to bacterial entry during nodule development in peanut (Arachis hypogaea). New Phytologist, 236(6), 2265-2281.
[0199] Boisson-Dernier, A., Chabaud, M., Garcia, F., Bécard, G., Rosenberg, 889 C., & Barker, D. G. (2001). Agrobacterium rhizogenes-Transformed Roots of Medicago truncatula for the Study of Nitrogen-Fixing and Endomycorrhizal Symbiotic Associations. Molecular Plant-Microbe Interactions®, 14(6), 695-700.
[0200] Bray, N. L., Pimentel, H., Melsted, P., & Pachter, L. (2016). Near-optimal probabilistic RNA-seq quantification. Nature Biotechnology, 34(5), 525-527.
[0201] Clavijo, F., Diedhiou, I., Vaissayre, V., Brottier, L., Acolatse, J., Moukouanga, D., Crabos, A., Auguy, F., Franche, C., Gherbi, H., Champion, A., Hocher, V., Barker, D., Bogusz, D., Tisa, L. S., & Svistoonoff, S. (2015). The Casuarina NIN gene is transcriptionally activated throughout Frankia root infection as well as in response to bacterial diffusible signals. New Phytologist, 208(3), 887-903.
[0202] Crombez, H., Motte, H., & Beeckman, T. (2019). Tackling Plant Phosphate Starvation by the Roots. In Developmental Cell (Vol. 48, Issue 5, pp. 599-615). Cell Press.
[0203] Demina, I. V., Maity, P. J., Nagchowdhury, A., Ng, J. L. P., van der Graaff, E., Demchenko, K. N., Roitsch, T., Mathesius, U., & Pawlowski, K. (2019). Accumulation of and Response to Auxins in Roots and Nodules of the Actinorhizal Plant Datisca glomerata Compared to the Model Legume Medicago truncatula. Frontiers in Plant Science, 10.
[0204] Fan, H. M., Sun, C. H., Wen, L. Z., Liu, B. W., Ren, H., Sun, X., Ma, F. F., & Zheng, C. S. (2019). CmTCP20 Plays a Key Role in Nitrate and Auxin Signaling-Regulated Lateral Root Development in Chrysanthemum. Plant and Cell Physiology, 60(7), 1581-1594.
[0205] Freire-Rios, A., Tanaka, K., Crespo, I., van der Wijk, E., Sizentsova, Y., Levitsky, V., Lindhoud, S., Fontana, M., Hohlbein, J., Boer, D. R., Mironova, V., & Weijers, D. (2020). Architecture of DNA elements mediating ARF transcription factor binding and auxin responsive gene expression in Arabidopsis. Proceedings of the National Academy of Sciences, 117(39), 24557-24566.
[0206] Fu, M., Sun, J., Li, X., Guan, Y., & Xie, F. (2022). Asymmetric redundancy of soybean Nodule Inception (NIN) genes in root nodule symbiosis. Plant Physiology, 188(1), 477-489.
[0207] Gauthier-Coles, C., White, R. G., & Mathesius, U. (2019). Nodulating legumes are distinguished by a sensitivity to cytokinin in the root cortex leading to pseudonodule development. Frontiers in Plant Science, 9.
[0208] Gilbert, G. A., Knight, J. D., Vance, C. P., & Allan, D. L. (2000). Proteoid root development of phosphorus deficient lupin is mimicked by auxin and phosphonate. Annals of Botany, 85(6), 921-928.
[0209] Goodstein, D. M., Shu, S., Howson, R., Neupane, R., Hayes, R. D., Fazo, J., Mitros, T., Dirks, W., Hellsten, U., Putnam, N., & Rokhsar, D. S. (2012). Phytozome: A comparative platform for green plant genomics. Nucleic Acids Research, 40(D1).
[0210] Griesmann, M., Chang, Y., Liu, X., Song, Y., Haberer, G., Crook, M. B., Billault-Penneteau, B., Lauressergues, D., Keller, J., Imanishi, L., Roswanjaya, Y. P., Kohlen, W., Pujic, P., Battenberg, K., Alloisio, N., Liang, Y., Hilhorst, H., Salgado, M. G., Hocher, V., . . . Cheng, S. (2018). Phylogenomics reveals multiple losses of nitrogen-fixing root nodule symbiosis. Science, 361(6398).
[0211] Guan, P., Ripoll, J. J., Wang, R., Vuong, L., Bailey-Steinitz, L. J., Ye, D., & Crawford, N. M. (2017). Interacting TCP and NLP transcription factors control plant responses to nitrate availability. Proceedings of the National Academy of Sciences of the United States of America, 114(9), 2419-2424.
[0212] Hane, J. K., Ming, Y., Kamphuis, L. G., Nelson, M. N., Garg, G., Atkins, C. A., Bayer, P. E., Bravo, A., Bringans, S., Cannon, S., Edwards, D., Foley, R., Gao, L. L., Harrison, M. J., Huang, W., Hurgobin, B., Li, S., Liu, C. W., McGrath, A., . . . Singh, K. B. (2017). A comprehensive draft genome sequence for lupin (Lupinus angustifolius), an emerging health food: insights into plant-microbe interactions and legume evolution. Plant Biotechnology Journal, 15(3), 318-330.
[0213] Hiltenbrand, R., Thomas, J., McCarthy, H., Dykema, K. J., Spurr, A., Newhart, H., Winn, M. E., & Mukherjee, A. (2016). A developmental and molecular view of formation of auxin-induced nodule-like structures in land plants. Frontiers in Plant Science, 7(NOVEMBER2016).
[0214] Ibáñez, F., Wall, L., & Fabra, A. (2017). Starting points in plant-bacteria nitrogen-fixing symbioses: Intercellular invasion of the roots. In Journal of Experimental Botany (Vol. 68, Issue 8, pp. 1905-1918). Oxford University Press.
[0215] Imani, J., Li, L., Schäfer, P., & Kogel, K. H. (2011). STARTS—A stable root transformation system for rapid functional analyses of proteins of the monocot model plant barley. Plant Journal, 67(4), 726-735.
[0216] Irving, T. B., Chakraborty, S., Maia, L. G. S., Knaack, S., Conde, D., Schmidt, H. W., Triozzi, P. M., Simmons, C. H., Roy, S., Kirst, M., & Ané, J. M. (2022). An LCO-responsive homolog of NODULE INCEPTION positively regulates lateral root formation in Populus sp. Plant Physiology, 190(3), 1699-1714.
[0217] Journet, E. P., El-Gachtouli, N., Vernoud, V., de Billy, F., Pichon, M., Dedieu, A., Arnould, C., Morandi, D., Barker, D. G., & Gianinazzi-Pearson, V. (2001). Medicago truncatula ENOD11: A Novel RPRP-Encoding Early Nodulin Gene Expressed During Mycorrhization in Arbuscule-Containing Cells. Molecular Plant-Microbe Interactions®, 14(6), 737-748.
[0218] Kohlen, W., Ng, J. L. P., Deinum, E. E., & Mathesius, U. (2018a). Auxin transport, metabolism, and signaling during nodule initiation: Indeterminate and determinate nodules. In Journal of Experimental Botany (Vol. 69, Issue 2, pp. 229-244). Oxford University Press.
[0219] Kohlen, W., Ng, J. L. P., Deinum, E. E., & Mathesius, U. (2018b). Auxin transport, metabolism, and signaling during nodule initiation: Indeterminate and determinate nodules. In Journal of Experimental Botany (Vol. 69, Issue 2, pp. 229-244). Oxford University Press.
[0220] Konishi, M., & Yanagisawa, S. (2013). Arabidopsis NIN-like transcription factors have a central role in nitrate signaling. Nature Communications, 4.
[0221] Lerouge, P., Roche, P., Fauchert, C., Maillett, F., Truchett, G., Prome, J. C., & Denariet, J. (1990). Symbiotic host-specificity of Rhizobium me/i/oti is determined by a sulphated and acylated glucosamine oligosaccharide signal LETTERS TO NATURE. In NATURE (Vol. 344).
[0222] Li, X. R., Sun, J., Albinsky, D., Zarrabian, D., Hull, R., Lee, T., Jarratt-Barnham, E., Chiu, C. H., Jacobsen, A., Soumpourou, E., Albanese, A., Kohlen, W., Luginbuehl, L. H., Guillotin, B., Lawrensen, T., Lin, H., Murray, J., Wallington, E., Harwood, W., . . . Oldroyd, G. E. D. (2022). Nutrient regulation of lipochitooligosaccharide recognition in plants via NSP1 and NSP2. Nature Communications, 13(1).
[0223] Liao, Y., Smyth, G. K., & Shi, W. (2014). FeatureCounts: An efficient general purpose program for assigning sequence reads to genomic features. Bioinformatics, 30(7), 923-930.
[0224] Liu, J., & Bisseling, T. (2020). Evolution of nin and NIN-like genes in relation to nodule symbiosis. In Genes (Vol. 11, Issue 7, pp. 1-15). MDPI AG.
[0225] Liu, J., Rasing, M., Zeng, T., Klein, J., Kulikova, O., & Bisseling, T. (2021). NIN is essential for development of symbiosomes, suppression of defence and premature senescence in Medicago truncatula nodules. New Phytologist, 230(1), 290-303.
[0226] Liu, J., Rutten, L., Limpens, E., Van Der Molen, T., Van Velzen, R., Chen, R., Chen, Y., Geurts, R., Kohlen, W., Kulikova, O., & Bisseling, T. (2019). A remote cis-regulatory region is required for nin expression in the pericycle to initiate nodule primordium formation in Medicago truncatula. Plant Cell, 31(1), 68-83.
[0227] Liu, K. H., Niu, Y., Konishi, M., Wu, Y., Du, H., Sun Chung, H., Li, L., Boudsocq, M., McCormack, M., Maekawa, S., Ishida, T., Zhang, C., Shokat, K., Yanagisawa, S., & Sheen, J. (2017). Discovery of nitrate-CPK-NLP signaling in central nutrient-growth networks. Nature, 545(7654), 311-316.
[0228] Liu, K. H., Liu, M., Lin, Z., Wang, Z. F., Chen, B., Liu, C., Guo, A., Konishi, M., Yanagisawa, S., Wagner, G., & Sheen, J. (2022). NIN-like protein 7 transcription factor is a plant nitrate sensor. Science, 377(6613), 1419-1425.
[0229] Marchive, C., Roudier, F., Castaings, L., Bréhaut, V., Blondet, E., Colot, V., Meyer, C., & Krapp, A. (2013). Nuclear retention of the transcription factor NLP7 orchestrates the early response to nitrate in plants. Nature Communications, 4.
[0230] Marsh, J. F., Rakocevic, A., Mitra, R. M., Brocard, L., Sun, J., Eschstruth, A., Long, S. R., Schultze, M., Ratet, P., & Oldroyd, G. E. D. (2007). Medicago truncatula NIN is essential for rhizobial-independent nodule organogenesis induced by autoactive calcium/calmodulin-dependent protein kinase. Plant Physiology, 144(1), 324-335.
[0231] Mironova, V. V., Omelyanchuk, N. A., Wiebe, D. S., & Levitsky, V. G. (2014). Computational analysis of auxin responsive elements in the Arabidopsis thaliana L. genome. BMC Genomics, 15.
[0232] Mu, X., & Luo, J. (2019). Evolutionary analyses of NIN-like proteins in plants and their roles in nitrate signaling. In Cellular and Molecular Life Sciences (Vol. 76, Issue 19, pp. 3753-3764). Birkhauser Verlag AG.
[0233] Ng, J. L. P., Hassan, S., Truong, T. T., Hocart, C. H., Laffont, C., Frugier, F., & Mathesiusa, U. (2015). Flavonoids and auxin transport inhibitors rescue symbiotic nodulation in the Medicago truncatula cytokinin perception mutant crel. Plant Cell, 27(8), 2210-2226.
[0234] Nguyen, T. Van, Wibberg, D., Battenberg, K., Blom, J., Vanden Heuvel, B., Berry, A. M., Kalinowski, J., & Pawlowski, K. (2016). An assemblage of Frankia Cluster II strains from California contains the canonical nod genes and also the sulfotransferase gene nodH. BMC Genomics, 17(1).
[0235] Pawlowski, K., & Demchenko, K. N. (2012). The diversity of actinorhizal symbiosis. In Protoplasma (Vol. 249, Issue 4, pp. 967-979). Springer-Verlag Wien.
[0236] Persson, T., Battenberg, K., Demina, I. V., Vigil-Stenman, T., Heuvel, B. Vanden, Pujic, P., Facciotti, M. T., Wilbanks, E. G., O'Brien, A., Fournier, P., Hernandez, M. A. C., Herrera, A. M., Médigue, C., Normand, P., Pawlowski, K., & Berry, A. M. (2015). Candidatus Frankia datiscae Dg1, the Actinobacterial microsymbiont of Datisca glomerata, expresses the canonical nod genes NodABC in symbiosis with its host plant. PLoS ONE, 10(5).
[0237] Rightmyer, A. P., & Long, S. R. (2011). Pseudonodule Formation by Wild-Type and Symbiotic Mutant Medicago truncatula in Response to Auxin Transport Inhibitors. Molecular Plant-Microbe Interactions MPMI, 24(11), 1372-1384.
[0238] Roy, S., Robson, F., Lilley, J., Liu, C. W., Cheng, X., Wen, J., Walker, S., Sun, J., Cousins, D., Bone, C., Bennett, M. J., Downie, J. A., Swarup, R., Oldroyd, G., & Murray, J. D. (2017). MtLAX2, a functional homologue of the arabidopsis auxin influx transporter AUX1, is required for nodule organogenesis. Plant Physiology, 174(1), 326-338.
[0239] S. Andrews. (2010). FASTQC. A quality control tool for high throughput sequence data.
[0240] Sato, S., Nakamura, Y., Kaneko, T., Asamizu, E., Kato, T., Nakao, M., Sasamoto, S., Watanabe, A., Ono, A., Kawashima, K., Fujishiro, T., Katoh, M., Kohara, M., Kishida, Y., Minami, C., Nakayama, S., Nakazaki, N., Shimizu, Y., Shinpo, S., . . . Tabata, S. (2008). Genome structure of the legume, Lotus japonicus. DNA Research, 15(4), 227-239.
[0241] Schauser, L., Roussis, A., Stiller, J., & Stougaard, J. (1999). A plant regulator controlling development of symbiotic root nodules. Nature, 402(6758), 191-195.
[0242] Schiessl, K., Lilley, J. L. S., Lee, T., Tamvakis, I., Kohlen, W., Bailey, P. C., Thomas, A., Luptak, J., Ramakrishnan, K., Carpenter, M. D., Mysore, K. S., Wen, J., Ahnert, S., Grieneisen, V. A., & Oldroyd, G. E. D. (2019). NODULE INCEPTION Recruits the Lateral Root Developmental Program for Symbiotic Nodule Organogenesis in Medicago truncatula. Current Biology, 29(21), 3657-3668.e5.
[0243] Schmutz, J., Cannon, S. B., Schlueter, J., Ma, J., Mitros, T., Nelson, W., Hyten, D. L., Song, Q., Thelen, J. J., Cheng, J., Xu, D., Hellsten, U., May, G. D., Yu, Y., Sakurai, T., Umezawa, T., Bhattacharyya, M. K., Sandhu, D., Valliyodan, B., . . . Jackson, S. A. (2010). Genome sequence of the palaeopolyploid soybean. Nature, 463(7278), 178-183.
[0244] Shrestha, A., Zhong, S., Therrien, J., Huebert, T., Sato, S., Mun, T., Andersen, S. U., Stougaard, J., Lepage, A., Niebel, A., Ross, L., & Szczyglowski, K. (2021). Lotus japonicus Nuclear Factor YA1, a nodule emergence stage-specific regulator of auxin signaling. New Phytologist, 229(3), 1535-1552.
[0245] Skene, K. R. (2001). Cluster roots: model experimental tools for key biological problems. Journal of Experimental Botany, 52(suppl 1), 479-485.
[0246] Soyano, T., Hirakawa, H., Sato, S., Hayashi, M., & Kawaguchi, M. (2014). NODULE INCEPTION creates a long-distance negative feedback loop involved in homeostatic regulation of nodule organ production. Proceedings of the National Academy of Sciences of the United States of America, 111(40), 14607-14612.
[0247] Soyano, T., Kouchi, H., Hirota, A., & Hayashi, M. (2013). NODULE INCEPTION Directly Targets NF-Y Subunit Genes to Regulate Essential Processes of Root Nodule Development in Lotus japonicus. PLoS Genetics, 9(3).
[0248] Soyano, T., Shimoda, Y., Kawaguchi, M., & Hayashi, M. (2019). A shared gene drives lateral root development and root nodule symbiosis pathways in Lotus. Science, 366(6468), 1021-1023.
[0249] Suzuki, W., Konishi, M., & Yanagisawa, S. (2013). The evolutionary events necessary for the emergence of symbiotic nitrogen fixation in legumes may involve a loss of nitrate responsiveness of the NIN transcription factor. Plant Signaling and Behavior, 8(10).
[0250] Tang, H., Krishnakumar, V., Bidwell, S., Rosen, B., Chan, A., Zhou, S., Gentzbittel, L., Childs, K. L., Yandell, M., Gundlach, H., Mayer, K. F., Schwartz, D. C., & Town, C. D. (2014). An improved genome release (version Mt4.0) for the model legume Medicago truncatula. BMC Genomics, 15(1), 312.
[0251] Tuskan, G. A., DiFazio, S., Jansson, S., Bohlmann, J., Grigoriev, I., Hellsten, U., Putnam, N., Ralph, S., Rombauts, S., Salamov, A., Schein, J., Sterck, L., Aerts, A., Bhalerao, R. R., Bhalerao, R. P., Blaudez, D., Boerjan, W., Brun, A., Brunner, A., . . . Rokhsar, D. (2006). The Genome of Black Cottonwood, Populus trichocarpa (Torr. &amp; Gray). Science, 313(5793), 1596-1604.
[0252] Ulmasov, T., Hagen, G., & Guilfoyle, T. J. (1997). ARF1, a Transcription Factor That Binds to Auxin Response Elements. Science, 276(5320), 1865-1868.
[0253] van Velzen, R., Holmer, R., Bu, F., Rutten, L., van Zeijl, A., Liu, W., Santuari, L., Cao, Q., Sharma, T., Shen, D., Roswanjaya, Y., Wardhani, T. A. K., Kalhor, M. S., Jansen, J., van den Hoogen, J., Güngör, B., Hartog, M., Hontelez, J., Verver, J., . . . Geurts, R. (2018). Comparative genomics of the nonlegume Parasponia reveals insights into evolution of nitrogen-fixing rhizobium symbioses. Proceedings of the National Academy of Sciences, 115(20).
[0254] Varshney, R. K., Chen, W., Li, Y., Bharti, A. K., Saxena, R. K., Schlueter, J. A., Donoghue, M. T. A., Azam, S., Fan, G., Whaley, A. M., Farmer, A. D., Sheridan, J., Iwata, A., Tuteja, R., Penmetsa, R. V., Wu, W., Upadhyaya, H. D., Yang, S. P., Shah, T., . . . Jackson, S. A. (2012). Draft genome sequence of pigeonpea (Cajanus cajan), an orphan legume crop of resource-poor farmers. Nature 1074 Biotechnology, 30(1), 83-89.
[0255] Varshney, R. K., Song, C., Saxena, R. K., Azam, S., Yu, S., Sharpe, A. G., Cannon, S., Baek, J., Rosen, B. D., Tar'an, B., Millan, T., Zhang, X., Ramsay, L. D., Iwata, A., Wang, Y., Nelson, W., Farmer, A. D., Gaur, P. M., Soderlund, C., . . . Cook, D. R. (2013). Draft genome sequence of chickpea (Cicer arietinum) provides a resource for trait improvement. Nature Biotechnology, 31(3), 240-246.
[0256] Vernié, T., Kim, J., Frances, L., Ding, Y., Sun, J., Guan, D., Niebel, A., Gifford, M. L., de Carvalho-Niebel, F., & Oldroyd, G. E. D. (2015). The NIN transcription factor coordinates diverse nodulation programs in different tissues of the Medicago truncatula root. Plant Cell, 27(12), 3410-3424.
[0257] Vidal, E. A., Araus, V., Lu, C., Parry, G., Green, P. J., Coruzzi, G. M., & Gutiérrez, R. A. (2010). Nitrate-responsive miR393/AFB3 regulatory module controls root system architecture in Arabidopsis thaliana. Proceedings of the National Academy of Sciences of the United States of America, 107(9), 4477-4482.
[0258] Wang, X., Pearse, S. J., & Lambers, H. (2013). Cluster-root formation and carboxylate release in three Lupinus species as dependent on phosphorus supply, internal phosphorus concentration and relative growth rate. Annals of Botany, 112(7), 1449-1459.
[0259] Weber, E., Engler, C., Gruetzner, R., Werner, S., & Marillonnet, S. (2011). A modular cloning system for standardized assembly of multigene constructs. PLoS ONE, 6(2).
[0260] Wu, T. Y., Goh, H. Z., Azodi, C. B., Krishnamoorthi, S., Liu, M. J., & Urano, D. (2021). Evolutionarily conserved hierarchical gene regulatory networks for plant salt stress response. Nature Plants, 7(6), 787-799.
[0261] Xie, F., Murray, J. D., Kim, J., Heckmann, A. B., Edwards, A., Oldroyd, G. E. D., & Downie, J. A. (2012). Legume pectate lyase required for root infection by rhizobia. Proceedings of the National Academy of Sciences of the United States of America, 109(2), 633-638.
[0262] Zhang, H., & Forde, B. G. (1998). An Arabidopsis MADS Box Gene That Controls Nutrient-Induced Changes in Root Architecture. Science, 279(5349), 407-409.
[0263] Zhang, Y., Lee, C. W., Wehner, N., Imdahl, F., Svetlana, V., Weiste, C., Dröge-Laser, W., & Deeken, R. (2015). Regulation of Oncogene Expression in T-DNA-Transformed Host Plant Cells. PLoS Pathogens, 11(1), 1-27.

1. A genetically altered plant or part thereof comprising one or more genetic alterations that increase activity of a NODULE INCEPTION (NIN) protein or a NIN-like protein (NLP protein) in response to auxin signaling as compared to a control plant without the one or more genetic alterations.

2. The genetically altered plant or part thereof of claim 1, wherein the one or more genetic alterations comprise addition of one or more auxin response elements (AuxREs) operably linked to a nucleic acid encoding the NIN protein or the NLP protein.

3. The genetically altered plant or part thereof of claim 2, wherein the one or more genetic alterations comprise addition of two or more, three or more, four or more, five or more, six or more, seven or more, eight or more, nine or more, ten or more, eleven or more, twelve or more, thirteen or more, fourteen or more, fifteen or more, sixteen or more, seventeen or more, eighteen or more, nineteen or more, twenty or more, twenty-one or more, twenty-two or more, twenty-three or more, or twenty-four or more AuxREs.

4. The genetically altered plant or part thereof of claim 2, wherein the one or more AuxREs comprise a TGTCTC motif or a TGTCTN motif.

5. The genetically altered plant or part thereof of claim 2, wherein the one or more AuxREs are added between a cyclops binding site and a transcriptional start site of the nucleic acid encoding the NIN protein or the NLP protein.

6. The genetically altered plant or part thereof of claim 2, wherein the NIN protein or the NLP protein comprises an amino acid sequence with at least 80%, at least 85%, at least 90%, at least 91%, at least 92%, at least 93%, at least 94%, at least 95%, at least 96%, at least 97%, at least 98%, at least 99%, or 100% identity to SEQ ID NO: 649.

7. The genetically altered plant or part thereof of claim 2, wherein the nucleic acid encodes a NIN protein, and wherein the NIN protein has at least 70% sequence identity, at least 75% sequence identity, at least 80% sequence identity, at least 85% sequence identity, at least 90% sequence identity, at least 95% sequence identity, at least 96% sequence identity, at least 97% sequence identity, at least 98% sequence identity, or at least 99% sequence identity to an amino acid sequence selected from the group consisting of SEQ ID NO: 551, SEQ ID NO: 552, SEQ ID NO: 553, SEQ ID NO: 554, SEQ ID NO: 555, SEQ ID NO: 556, SEQ ID NO: 557, SEQ ID NO: 558, SEQ ID NO: 559, SEQ ID NO: 560, SEQ ID NO: 561, SEQ ID NO: 562, SEQ ID NO: 563, SEQ ID NO: 564, SEQ ID NO: 565, SEQ ID NO: 566, SEQ ID NO: 567, SEQ ID NO: 568, SEQ ID NO: 569, SEQ ID NO: 570, SEQ ID NO: 571, SEQ ID NO: 572, SEQ ID NO: 573, SEQ ID NO: 574, SEQ ID NO: 575, SEQ ID NO: 576, SEQ ID NO: 577, SEQ ID NO: 578, SEQ ID NO: 579, SEQ ID NO: 580, SEQ ID NO: 581, SEQ ID NO: 582, SEQ ID NO: 583, SEQ ID NO: 584, SEQ ID NO: 585, SEQ ID NO: 586, SEQ ID NO: 587, and SEQ ID NO: 588.

8. (canceled)

9. The genetically altered plant or part thereof of claim 2, wherein the nucleic acid encodes a NIN/NLP1 orthogroup protein, and wherein the NIN/NLP1 orthogroup protein has at least 70% sequence identity, at least 75% sequence identity, at least 80% sequence identity, at least 85% sequence identity, at least 90% sequence identity, at least 95% sequence identity, at least 96% sequence identity, at least 97% sequence identity, at least 98% sequence identity, or at least 99% sequence identity to an amino acid sequence selected from the group consisting of SEQ ID NO: 1, SEQ ID NO: 2, SEQ ID NO: 3, SEQ ID NO: 4, SEQ ID NO: 5, SEQ ID NO: 6, SEQ ID NO: 8, SEQ ID NO: 9, SEQ ID NO: 10, SEQ ID NO: 11, SEQ ID NO: 12, SEQ ID NO: 13, SEQ ID NO: 14, SEQ ID NO: 15, SEQ ID NO: 16, SEQ ID NO: 17, SEQ ID NO: 18, SEQ ID NO: 19, SEQ ID NO: 20, SEQ ID NO: 21, SEQ ID NO: 22, SEQ ID NO: 23, SEQ ID NO: 24, SEQ ID NO: 25, SEQ ID NO: 26, SEQ ID NO: 27, SEQ ID NO: 28, SEQ ID NO: 29, SEQ ID NO: 30, SEQ ID NO: 31, SEQ ID NO: 32, SEQ ID NO: 33, SEQ ID NO: 34, SEQ ID NO: 35, SEQ ID NO: 36, SEQ ID NO: 37, SEQ ID NO: 38, SEQ ID NO: 39, SEQ ID NO: 40, SEQ ID NO: 41, SEQ ID NO: 42, SEQ ID NO: 43, SEQ ID NO: 44, SEQ ID NO: 45, SEQ ID NO: 46, SEQ ID NO: 47, SEQ ID NO: 48, SEQ ID NO: 49, SEQ ID NO: 50, SEQ ID NO: 51, SEQ ID NO: 52, SEQ ID NO: 53, SEQ ID NO: 54, SEQ ID NO: 55, SEQ ID NO: 56, SEQ ID NO: 57, SEQ ID NO: 58, SEQ ID NO: 59, SEQ ID NO: 60, SEQ ID NO: 61, SEQ ID NO: 62, SEQ ID NO: 63, SEQ ID NO: 64, SEQ ID NO: 65, SEQ ID NO: 66, SEQ ID NO: 67, SEQ ID NO: 68, SEQ ID NO: 69, SEQ ID NO: 70, SEQ ID NO: 71, SEQ ID NO: 72, SEQ ID NO: 73, SEQ ID NO: 74, SEQ ID NO: 75, SEQ ID NO: 76, SEQ ID NO: 77, SEQ ID NO: 79, SEQ ID NO: 80, SEQ ID NO: 81, SEQ ID NO: 82, SEQ ID NO: 83, SEQ ID NO: 84, SEQ ID NO: 85, SEQ ID NO: 86, SEQ ID NO: 87, SEQ ID NO: 88, SEQ ID NO: 89, SEQ ID NO: 90, SEQ ID NO: 91, SEQ ID NO: 92, SEQ ID NO: 93, SEQ ID NO: 94, SEQ ID NO: 95, SEQ ID NO: 96, SEQ ID NO: 98, SEQ ID NO: 99, SEQ ID NO: 100, SEQ ID NO: 101, SEQ ID NO: 102, SEQ ID NO: 103, SEQ ID NO: 104, SEQ ID NO: 105, SEQ ID NO: 106, SEQ ID NO: 108, SEQ ID NO: 109, SEQ ID NO: 131, SEQ ID NO: 132, SEQ ID NO: 133, SEQ ID NO: 134, SEQ ID NO: 135, SEQ ID NO: 136, SEQ ID NO: 137, SEQ ID NO: 138, SEQ ID NO: 139, SEQ ID NO: 140, SEQ ID NO: 141, SEQ ID NO: 142, SEQ ID NO: 143, SEQ ID NO: 144, SEQ ID NO: 145, SEQ ID NO: 146, SEQ ID NO: 147, SEQ ID NO: 148, SEQ ID NO: 149, SEQ ID NO: 150, SEQ ID NO: 151, SEQ ID NO: 152, SEQ ID NO: 153, SEQ ID NO: 154, SEQ ID NO: 155, SEQ ID NO: 156, SEQ ID NO: 157, SEQ ID NO: 158, SEQ ID NO: 159, SEQ ID NO: 160, SEQ ID NO: 161, SEQ ID NO: 162, SEQ ID NO: 163, SEQ ID NO: 164, SEQ ID NO: 165, SEQ ID NO: 166, SEQ ID NO: 167, SEQ ID NO: 168, SEQ ID NO: 169, SEQ ID NO: 170, SEQ ID NO: 171, SEQ ID NO: 172, SEQ ID NO: 173, SEQ ID NO: 174, SEQ ID NO: 175, SEQ ID NO: 177, SEQ ID NO: 178, SEQ ID NO: 179, SEQ ID NO: 180, SEQ ID NO: 181, SEQ ID NO: 182, SEQ ID NO: 183, SEQ ID NO: 184, SEQ ID NO: 185, SEQ ID NO: 186, SEQ ID NO: 187, SEQ ID NO: 188, SEQ ID NO: 189, SEQ ID NO: 190, SEQ ID NO: 191, SEQ ID NO: 192, SEQ ID NO: 193, SEQ ID NO: 194, SEQ ID NO: 196, SEQ ID NO: 197, SEQ ID NO: 198, SEQ ID NO: 199, SEQ ID NO: 200, SEQ ID NO: 201, SEQ ID NO: 202, SEQ ID NO: 203, SEQ ID NO: 204, SEQ ID NO: 205, SEQ ID NO: 206, SEQ ID NO: 207, SEQ ID NO: 208, SEQ ID NO: 209, SEQ ID NO: 210, SEQ ID NO: 211, SEQ ID NO: 212, SEQ ID NO: 213, SEQ ID NO: 214, SEQ ID NO: 215, SEQ ID NO: 216, SEQ ID NO: 217, SEQ ID NO: 218, SEQ ID NO: 219, SEQ ID NO: 220, SEQ ID NO: 221, SEQ ID NO: 222, SEQ ID NO: 223, SEQ ID NO: 224, SEQ ID NO: 225, SEQ ID NO: 226, SEQ ID NO: 227, SEQ ID NO: 228, SEQ ID NO: 229, SEQ ID NO: 230, SEQ ID NO: 231, SEQ ID NO: 232, SEQ ID NO: 233, SEQ ID NO: 234, SEQ ID NO: 235, SEQ ID NO: 236, SEQ ID NO: 551, SEQ ID NO: 552, SEQ ID NO: 553, SEQ ID NO: 554, SEQ ID NO: 555, SEQ ID NO: 556, SEQ ID NO: 557, SEQ ID NO: 558, SEQ ID NO: 559, SEQ ID NO: 560, SEQ ID NO: 561, SEQ ID NO: 562, SEQ ID NO: 563, SEQ ID NO: 564, SEQ ID NO: 565, SEQ ID NO: 566, SEQ ID NO: 567, SEQ ID NO: 568, SEQ ID NO: 569, SEQ ID NO: 570, SEQ ID NO: 571, SEQ ID NO: 572, SEQ ID NO: 573, SEQ ID NO: 574, SEQ ID NO: 575, SEQ ID NO: 576, SEQ ID NO: 577, SEQ ID NO: 578, SEQ ID NO: 579, SEQ ID NO: 580, SEQ ID NO: 581, SEQ ID NO: 582, SEQ ID NO: 583, SEQ ID NO: 584, SEQ ID NO: 585, SEQ ID NO: 586, SEQ ID NO: 587, and SEQ ID NO: 588.

10. The genetically altered plant or part thereof of claim 2, wherein the nucleic acid encodes a NLP2-3 orthogroup protein, and wherein the NLP2-3 orthogroup protein has at least 70% sequence identity, at least 75% sequence identity, at least 80% sequence identity, at least 85% sequence identity, at least 90% sequence identity, at least 95% sequence identity, at least 96% sequence identity, at least 97% sequence identity, at least 98% sequence identity, or at least 99% sequence identity to an amino acid sequence selected from the group consisting of SEQ ID NO: 237, SEQ ID NO: 238, SEQ ID NO: 239, SEQ ID NO: 241, SEQ ID NO: 242, SEQ ID NO: 243, SEQ ID NO: 244, SEQ ID NO: 245, SEQ ID NO: 246, SEQ ID NO: 247, SEQ ID NO: 248, SEQ ID NO: 250, SEQ ID NO: 251, SEQ ID NO: 252, SEQ ID NO: 253, SEQ ID NO: 254, SEQ ID NO: 255, SEQ ID NO: 256, SEQ ID NO: 257, SEQ ID NO: 258, SEQ ID NO: 259, SEQ ID NO: 260, SEQ ID NO: 261, SEQ ID NO: 262, SEQ ID NO: 263, SEQ ID NO: 264, SEQ ID NO: 265, SEQ ID NO: 266, SEQ ID NO: 267, SEQ ID NO: 268, SEQ ID NO: 269, SEQ ID NO: 270, SEQ ID NO: 271, SEQ ID NO: 273, SEQ ID NO: 274, SEQ ID NO: 275, SEQ ID NO: 276, SEQ ID NO: 277, SEQ ID NO: 278, SEQ ID NO: 279, SEQ ID NO: 280, SEQ ID NO: 281, SEQ ID NO: 282, SEQ ID NO: 283, SEQ ID NO: 284, SEQ ID NO: 285, SEQ ID NO: 286, SEQ ID NO: 287, SEQ ID NO: 288, SEQ ID NO: 289, SEQ ID NO: 290, SEQ ID NO: 291, SEQ ID NO: 292, SEQ ID NO: 293, SEQ ID NO: 294, SEQ ID NO: 295, SEQ ID NO: 296, SEQ ID NO: 297, SEQ ID NO: 298, SEQ ID NO: 299, SEQ ID NO: 300, SEQ ID NO: 301, SEQ ID NO: 302, SEQ ID NO: 303, SEQ ID NO: 304, SEQ ID NO: 305, SEQ ID NO: 306, SEQ ID NO: 307, SEQ ID NO: 308, SEQ ID NO: 309, SEQ ID NO: 310, SEQ ID NO: 311, SEQ ID NO: 312, SEQ ID NO: 313, SEQ ID NO: 314, SEQ ID NO: 315, SEQ ID NO: 316, SEQ ID NO: 317, SEQ ID NO: 318, SEQ ID NO: 319, SEQ ID NO: 320, SEQ ID NO: 321, SEQ ID NO: 322, SEQ ID NO: 323, SEQ ID NO: 324, SEQ ID NO: 325, SEQ ID NO: 326, SEQ ID NO: 327, SEQ ID NO: 328, SEQ ID NO: 329, SEQ ID NO: 332, SEQ ID NO: 333, SEQ ID NO: 334, SEQ ID NO: 335, SEQ ID NO: 336, SEQ ID NO: 337, SEQ ID NO: 338, SEQ ID NO: 339, SEQ ID NO: 340, SEQ ID NO: 341, SEQ ID NO: 342, SEQ ID NO: 343, SEQ ID NO: 344, SEQ ID NO: 345, SEQ ID NO: 346, SEQ ID NO: 347, SEQ ID NO: 348, SEQ ID NO: 349, SEQ ID NO: 350, SEQ ID NO: 351, SEQ ID NO: 352, SEQ ID NO: 353, SEQ ID NO: 354, SEQ ID NO: 355, SEQ ID NO: 356, SEQ ID NO: 357, SEQ ID NO: 358, SEQ ID NO: 359, SEQ ID NO: 360, SEQ ID NO: 361, SEQ ID NO: 362, SEQ ID NO: 363, SEQ ID NO: 364, SEQ ID NO: 365, SEQ ID NO: 366, SEQ ID NO: 367, SEQ ID NO: 368, SEQ ID NO: 369, SEQ ID NO: 371, SEQ ID NO: 372, SEQ ID NO: 373, SEQ ID NO: 374, SEQ ID NO: 375, SEQ ID NO: 376, and SEQ ID NO: 377.

11. The genetically altered plant or part thereof of claim 2, wherein the nucleic acid encodes a NLP4 orthogroup protein, and wherein the NLP4 orthogroup protein has at least 70% sequence identity, at least 75% sequence identity, at least 80% sequence identity, at least 85% sequence identity, at least 90% sequence identity, at least 95% sequence identity, at least 96% sequence identity, at least 97% sequence identity, at least 98% sequence identity, or at least 99% sequence identity to an amino acid sequence selected from the group consisting of SEQ ID NO: 378, SEQ ID NO: 379, SEQ ID NO: 380, SEQ ID NO: 381, SEQ ID NO: 382, SEQ ID NO: 383, SEQ ID NO: 384, SEQ ID NO: 385, SEQ ID NO: 386, SEQ ID NO: 387, SEQ ID NO: 388, SEQ ID NO: 389, SEQ ID NO: 390, SEQ ID NO: 391, SEQ ID NO: 392, SEQ ID NO: 393, SEQ ID NO: 394, SEQ ID NO: 395, SEQ ID NO: 396, SEQ ID NO: 397, SEQ ID NO: 398, SEQ ID NO: 399, SEQ ID NO: 400, SEQ ID NO: 401, SEQ ID NO: 402, SEQ ID NO: 403, SEQ ID NO: 404, SEQ ID NO: 405, SEQ ID NO: 406, SEQ ID NO: 408, SEQ ID NO: 409, SEQ ID NO: 410, SEQ ID NO: 411, SEQ ID NO: 412, SEQ ID NO: 413, SEQ ID NO: 414, SEQ ID NO: 415, SEQ ID NO: 417, SEQ ID NO: 418, SEQ ID NO: 419, SEQ ID NO: 420, SEQ ID NO: 421, SEQ ID NO: 422, SEQ ID NO: 423, SEQ ID NO: 424, SEQ ID NO: 425, SEQ ID NO: 426, SEQ ID NO: 427, SEQ ID NO: 428, SEQ ID NO: 429, SEQ ID NO: 430, SEQ ID NO: 431, SEQ ID NO: 432, SEQ ID NO: 433, SEQ ID NO: 434, SEQ ID NO: 435, SEQ ID NO: 436, SEQ ID NO: 437, SEQ ID NO: 438, SEQ ID NO: 439, SEQ ID NO: 440, SEQ ID NO: 441, SEQ ID NO: 442, SEQ ID NO: 443, SEQ ID NO: 444, SEQ ID NO: 445, SEQ ID NO: 446, SEQ ID NO: 447, SEQ ID NO: 448, SEQ ID NO: 449, SEQ ID NO: 450, SEQ ID NO: 451, SEQ ID NO: 452, SEQ ID NO: 453, SEQ ID NO: 455, SEQ ID NO: 456, SEQ ID NO: 457, SEQ ID NO: 458, SEQ ID NO: 459, SEQ ID NO: 460, SEQ ID NO: 461, SEQ ID NO: 462, SEQ ID NO: 463, SEQ ID NO: 464, SEQ ID NO: 465, SEQ ID NO: 466, SEQ ID NO: 467, SEQ ID NO: 468, SEQ ID NO: 469, SEQ ID NO: 470, SEQ ID NO: 471, SEQ ID NO: 472, SEQ ID NO: 473, SEQ ID NO: 474, SEQ ID NO: 475, SEQ ID NO: 476, SEQ ID NO: 477, SEQ ID NO: 478, SEQ ID NO: 479, SEQ ID NO: 480, SEQ ID NO: 481, SEQ ID NO: 482, SEQ ID NO: 483, SEQ ID NO: 484, SEQ ID NO: 485, SEQ ID NO: 486, SEQ ID NO: 487, SEQ ID NO: 488, SEQ ID NO: 489, SEQ ID NO: 490, SEQ ID NO: 491, SEQ ID NO: 492, SEQ ID NO: 493, SEQ ID NO: 494, SEQ ID NO: 495, SEQ ID NO: 496, SEQ ID NO: 497, SEQ ID NO: 498, SEQ ID NO: 499, SEQ ID NO: 500, SEQ ID NO: 501, SEQ ID NO: 502, SEQ ID NO: 504, SEQ ID NO: 505, SEQ ID NO: 506, SEQ ID NO: 507, SEQ ID NO: 508, SEQ ID NO: 509, SEQ ID NO: 510, SEQ ID NO: 511, SEQ ID NO: 512, SEQ ID NO: 513, SEQ ID NO: 514, SEQ ID NO: 515, SEQ ID NO: 516, SEQ ID NO: 517, SEQ ID NO: 518, SEQ ID NO: 519, SEQ ID NO: 520, SEQ ID NO: 521, SEQ ID NO: 522, SEQ ID NO: 523, and SEQ ID NO: 524.

12. The genetically altered plant or part thereof of claim 2, wherein the nucleic acid encodes a basal NIN/NLP orthogroup protein, and wherein the basal NIN/NLP orthogroup protein has at least 70% sequence identity, at least 75% sequence identity, at least 80% sequence identity, at least 85% sequence identity, at least 90% sequence identity, at least 95% sequence identity, at least 96% sequence identity, at least 97% sequence identity, at least 98% sequence identity, or at least 99% sequence identity to an amino acid sequence selected from the group consisting of SEQ ID NO: 525, SEQ ID NO: 526, SEQ ID NO: 527, SEQ ID NO: 528, SEQ ID NO: 529, SEQ ID NO: 530, SEQ ID NO: 531, SEQ ID NO: 532, SEQ ID NO: 533, SEQ ID NO: 534, SEQ ID NO: 535, SEQ ID NO: 536, SEQ ID NO: 537, SEQ ID NO: 538, SEQ ID NO: 539, SEQ ID NO: 540, SEQ ID NO: 541, SEQ ID NO: 542, SEQ ID NO: 543, SEQ ID NO: 544, SEQ ID NO: 545, SEQ ID NO: 546, SEQ ID NO: 547, SEQ ID NO: 548, SEQ ID NO: 549, and SEQ ID NO: 550.

13. The genetically altered plant or part thereof of claim 2, wherein the one or more AuxREs are derived from a promoter of a nucleic acid encoding the NIN protein or the NLP protein in a legume or an actinorhizal plant species or wherein the one or more AuxREs are derived from a synthetic auxin responsive promoter, optionally wherein the synthetic auxin responsive promoter is pDR5.

14. The genetically altered plant or part thereof of claim 2, wherein the one or more AuxREs and/or the nucleic acid encoding the NIN protein or the NLP protein are heterologous or transfected.

15. The genetically altered plant or part thereof of claim 2, wherein the one or more AuxREs and/or the nucleic acid encoding the NIN protein or the NLP protein are endogenous.

16. (canceled)

17. (canceled)

18. The genetically altered plant or part thereof of claim 1, wherein the genetically altered plant is a monocot, and wherein the genetically altered plant is selected from the group consisting of corn, rice, wheat, barley, sorghum, millet, oat, and rye.

19. The genetically altered plant or part thereof of claim 1, wherein the genetically altered plant is selected from the group consisting of apple, pear, plum, apricot, peach, almond, walnut, cherry, strawberry, raspberry, blackberry, red currant, black currant, melon, cucumber, pumpkin, squash, grape, hemp, hops, birch, beech, jujube, cassava, poplar, chestnut, citrus, potato, tomato, sweet potato, Datisca spp., Trema spp., and Jatropha spp.

20. The genetically altered plant or part thereof of claim 1, wherein the genetically altered plant is a non-nodulating plant and the increased activity of the NODULE INCEPTION (NIN) protein or the NIN-like protein (NLP protein) in response to auxin signaling induces formation of actinorhizal nodule-like structures.

21. A method of producing the genetically altered plant or part thereof of claim 1, comprising introducing a genetic alteration to the plant comprising a first nucleic acid sequence comprising one or more AuxREs.

22. The method of claim 21, further comprising introducing a second nucleic acid sequence encoding the NIN protein or the NLP protein, wherein the first nucleic acid sequence and the second nucleic acid sequence are operably linked.

23. The method of claim 21, wherein the first nucleic acid sequence is inserted into the genome of the plant so that the nucleic acid sequence is operably linked to an endogenous nucleic acid sequence encoding the NIN protein or the NLP protein.

24. The method of claim 21, wherein the one or more AuxREs comprise a TGTCTC motif or a TGTCTN motif.

25. The method of claim 21, wherein the first nucleic acid sequence comprises a synthetic auxin responsive promoter, optionally wherein the synthetic auxin responsive promoter is pDR5.

26. The method of claim 22, wherein the NIN protein or the NLP protein comprises an amino acid sequence with at least 80%, at least 85%, at least 90%, at least 91%, at least 92%, at least 93%, at least 94%, at least 95%, at least 96%, at least 97%, at least 98%, at least 99%, or 100% identity to SEQ ID NO: 649.

27. The method of claim 22,
(i) wherein the NIN protein or NLP protein is a NIN protein, wherein the NIN protein has at least 70% sequence identity, at least 75% sequence identity, at least 80% sequence identity, at least 85% sequence identity, at least 90% sequence identity, at least 95% sequence identity, at least 96% sequence identity, at least 97% sequence identity, at least 98% sequence identity, or at least 99% sequence identity to an amino acid sequence selected from the group consisting of SEQ ID NO: 551, SEQ ID NO: 552, SEQ ID NO: 553, SEQ ID NO: 554, SEQ ID NO: 555, SEQ ID NO: 556, SEQ ID NO: 557, SEQ ID NO: 558, SEQ ID NO: 559, SEQ ID NO: 560, SEQ ID NO: 561, SEQ ID NO: 562, SEQ ID NO: 563, SEQ ID NO: 564, SEQ ID NO: 565, SEQ ID NO: 566, SEQ ID NO: 567, SEQ ID NO: 568, SEQ ID NO: 569, SEQ ID NO: 570, SEQ ID NO: 571, SEQ ID NO: 572, SEQ ID NO: 573, SEQ ID NO: 574, SEQ ID NO: 575, SEQ ID NO: 576, SEQ ID NO: 577, SEQ ID NO: 578, SEQ ID NO: 579, SEQ ID NO: 580, SEQ ID NO: 581, SEQ ID NO: 582, SEQ ID NO: 583, SEQ ID NO: 584, SEQ ID NO: 585, SEQ ID NO: 586, SEQ ID NO: 587, and SEQ ID NO: 588;
(ii) wherein the NIN protein or the NLP protein is a NIN/NLP1 orthogroup protein, wherein the NIN/NLP1 orthogroup protein has at least 70% sequence identity, at least 75% sequence identity, at least 80% sequence identity, at least 85% sequence identity, at least 90% sequence identity, at least 95% sequence identity, at least 96% sequence identity, at least 97% sequence identity, at least 98% sequence identity, or at least 99% sequence identity to an amino acid sequence selected from the group consisting of SEQ ID NO: 1, SEQ ID NO: 2, SEQ ID NO: 3, SEQ ID NO: 4, SEQ ID NO: 5, SEQ ID NO: 6, SEQ ID NO: 8, SEQ ID NO: 9, SEQ ID NO: 10, SEQ ID NO: 11, SEQ ID NO: 12, SEQ ID NO: 13, SEQ ID NO: 14, SEQ ID NO: 15, SEQ ID NO: 16, SEQ ID NO: 17, SEQ ID NO: 18, SEQ ID NO: 19, SEQ ID NO: 20, SEQ ID NO: 21, SEQ ID NO: 22, SEQ ID NO: 23, SEQ ID NO: 24, SEQ ID NO: 25, SEQ ID NO: 26, SEQ ID NO: 27, SEQ ID NO: 28, SEQ ID NO: 29, SEQ ID NO: 30, SEQ ID NO: 31, SEQ ID NO: 32, SEQ ID NO: 33, SEQ ID NO: 34, SEQ ID NO: 35, SEQ ID NO: 36, SEQ ID NO: 37, SEQ ID NO: 38, SEQ ID NO: 39, SEQ ID NO: 40, SEQ ID NO: 41, SEQ ID NO: 42, SEQ ID NO: 43, SEQ ID NO: 44, SEQ ID NO: 45, SEQ ID NO: 46, SEQ ID NO: 47, SEQ ID NO: 48, SEQ ID NO: 49, SEQ ID NO: 50, SEQ ID NO: 51, SEQ ID NO: 52, SEQ ID NO: 53, SEQ ID NO: 54, SEQ ID NO: 55, SEQ ID NO: 56, SEQ ID NO: 57, SEQ ID NO: 58, SEQ ID NO: 59, SEQ ID NO: 60, SEQ ID NO: 61, SEQ ID NO: 62, SEQ ID NO: 63, SEQ ID NO: 64, SEQ ID NO: 65, SEQ ID NO: 66, SEQ ID NO: 67, SEQ ID NO: 68, SEQ ID NO: 69, SEQ ID NO: 70, SEQ ID NO: 71, SEQ ID NO: 72, SEQ ID NO: 73, SEQ ID NO: 74, SEQ ID NO: 75, SEQ ID NO: 76, SEQ ID NO: 77, SEQ ID NO: 79, SEQ ID NO: 80, SEQ ID NO: 81, SEQ ID NO: 82, SEQ ID NO: 83, SEQ ID NO: 84, SEQ ID NO: 85, SEQ ID NO: 86, SEQ ID NO: 87, SEQ ID NO: 88, SEQ ID NO: 89, SEQ ID NO: 90, SEQ ID NO: 91, SEQ ID NO: 92, SEQ ID NO: 93, SEQ ID NO: 94, SEQ ID NO: 95, SEQ ID NO: 96, SEQ ID NO: 98, SEQ ID NO: 99, SEQ ID NO: 100, SEQ ID NO: 101, SEQ ID NO: 102, SEQ ID NO: 103, SEQ ID NO: 104, SEQ ID NO: 105, SEQ ID NO: 106, SEQ ID NO: 108, SEQ ID NO: 109, SEQ ID NO: 131, SEQ ID NO: 132, SEQ ID NO: 133, SEQ ID NO: 134, SEQ ID NO: 135, SEQ ID NO: 136, SEQ ID NO: 137, SEQ ID NO: 138, SEQ ID NO: 139, SEQ ID NO: 140, SEQ ID NO: 141, SEQ ID NO: 142, SEQ ID NO: 143, SEQ ID NO: 144, SEQ ID NO: 145, SEQ ID NO: 146, SEQ ID NO: 147, SEQ ID NO: 148, SEQ ID NO: 149, SEQ ID NO: 150, SEQ ID NO: 151, SEQ ID NO: 152, SEQ ID NO: 153, SEQ ID NO: 154, SEQ ID NO: 155, SEQ ID NO: 156, SEQ ID NO: 157, SEQ ID NO: 158, SEQ ID NO: 159, SEQ ID NO: 160, SEQ ID NO: 161, SEQ ID NO: 162, SEQ ID NO: 163, SEQ ID NO: 164, SEQ ID NO: 165, SEQ ID NO: 166, SEQ ID NO: 167, SEQ ID NO: 168, SEQ ID NO: 169, SEQ ID NO: 170, SEQ ID NO: 171, SEQ ID NO: 172, SEQ ID NO: 173, SEQ ID NO: 174, SEQ ID NO: 175, SEQ ID NO: 177, SEQ ID NO: 178, SEQ ID NO: 179, SEQ ID NO: 180, SEQ ID NO: 181, SEQ ID NO: 182, SEQ ID NO: 183, SEQ ID NO: 184, SEQ ID NO: 185, SEQ ID NO: 186, SEQ ID NO: 187, SEQ ID NO: 188, SEQ ID NO: 189, SEQ ID NO: 190, SEQ ID NO: 191, SEQ ID NO: 192, SEQ ID NO: 193, SEQ ID NO: 194, SEQ ID NO: 196, SEQ ID NO: 197, SEQ ID NO: 198, SEQ ID NO: 199, SEQ ID NO: 200, SEQ ID NO: 201, SEQ ID NO: 202, SEQ ID NO: 203, SEQ ID NO: 204, SEQ ID NO: 205, SEQ ID NO: 206, SEQ ID NO: 207, SEQ ID NO: 208, SEQ ID NO: 209, SEQ ID NO: 210, SEQ ID NO: 211, SEQ ID NO: 212, SEQ ID NO: 213, SEQ ID NO: 214, SEQ ID NO: 215, SEQ ID NO: 216, SEQ ID NO: 217, SEQ ID NO: 218, SEQ ID NO: 219, SEQ ID NO: 220, SEQ ID NO: 221, SEQ ID NO: 222, SEQ ID NO: 223, SEQ ID NO: 224, SEQ ID NO: 225, SEQ ID NO: 226, SEQ ID NO: 227, SEQ ID NO: 228, SEQ ID NO: 229, SEQ ID NO: 230, SEQ ID NO: 231, SEQ ID NO: 232, SEQ ID NO: 233, SEQ ID NO: 234, SEQ ID NO: 235, SEQ ID NO: 236, SEQ ID NO: 551, SEQ ID NO: 552, SEQ ID NO: 553, SEQ ID NO: 554, SEQ ID NO: 555, SEQ ID NO: 556, SEQ ID NO: 557, SEQ ID NO: 558, SEQ ID NO: 559, SEQ ID NO: 560, SEQ ID NO: 561, SEQ ID NO: 562, SEQ ID NO: 563, SEQ ID NO: 564, SEQ ID NO: 565, SEQ ID NO: 566, SEQ ID NO: 567, SEQ ID NO: 568, SEQ ID NO: 569, SEQ ID NO: 570, SEQ ID NO: 571, SEQ ID NO: 572, SEQ ID NO: 573, SEQ ID NO: 574, SEQ ID NO: 575, SEQ ID NO: 576, SEQ ID NO: 577, SEQ ID NO: 578, SEQ ID NO: 579, SEQ ID NO: 580, SEQ ID NO: 581, SEQ ID NO: 582, SEQ ID NO: 583, SEQ ID NO: 584, SEQ ID NO: 585, SEQ ID NO: 586, SEQ ID NO: 587, and SEQ ID NO: 588;
(iii) wherein the NIN protein or the NLP protein is a NLP2-3 orthogroup protein, wherein the NLP2-3 orthogroup protein has at least 70% sequence identity, at least 75% sequence identity, at least 80% sequence identity, at least 85% sequence identity, at least 90% sequence identity, at least 95% sequence identity, at least 96% sequence identity, at least 97% sequence identity, at least 98% sequence identity, or at least 99% sequence identity to an amino acid sequence selected from the group consisting of SEQ ID NO: 237, SEQ ID NO: 238, SEQ ID NO: 239, SEQ ID NO: 241, SEQ ID NO: 242, SEQ ID NO: 243, SEQ ID NO: 244, SEQ ID NO: 245, SEQ ID NO: 246, SEQ ID NO: 247, SEQ ID NO: 248, SEQ ID NO: 250, SEQ ID NO: 251, SEQ ID NO: 252, SEQ ID NO: 253, SEQ ID NO: 254, SEQ ID NO: 255, SEQ ID NO: 256, SEQ ID NO: 257, SEQ ID NO: 258, SEQ ID NO: 259, SEQ ID NO: 260, SEQ ID NO: 261, SEQ ID NO: 262, SEQ ID NO: 263, SEQ ID NO: 264, SEQ ID NO: 265, SEQ ID NO: 266, SEQ ID NO: 267, SEQ ID NO: 268, SEQ ID NO: 269, SEQ ID NO: 270, SEQ ID NO: 271, SEQ ID NO: 273, SEQ ID NO: 274, SEQ ID NO: 275, SEQ ID NO: 276, SEQ ID NO: 277, SEQ ID NO: 278, SEQ ID NO: 279, SEQ ID NO: 280, SEQ ID NO: 281, SEQ ID NO: 282, SEQ ID NO: 283, SEQ ID NO: 284, SEQ ID NO: 285, SEQ ID NO: 286, SEQ ID NO: 287, SEQ ID NO: 288, SEQ ID NO: 289, SEQ ID NO: 290, SEQ ID NO: 291, SEQ ID NO: 292, SEQ ID NO: 293, SEQ ID NO: 294, SEQ ID NO: 295, SEQ ID NO: 296, SEQ ID NO: 297, SEQ ID NO: 298, SEQ ID NO: 299, SEQ ID NO: 300, SEQ ID NO: 301, SEQ ID NO: 302, SEQ ID NO: 303, SEQ ID NO: 304, SEQ ID NO: 305, SEQ ID NO: 306, SEQ ID NO: 307, SEQ ID NO: 308, SEQ ID NO: 309, SEQ ID NO: 310, SEQ ID NO: 311, SEQ ID NO: 312, SEQ ID NO: 313, SEQ ID NO: 314, SEQ ID NO: 315, SEQ ID NO: 316, SEQ ID NO: 317, SEQ ID NO: 318, SEQ ID NO: 319, SEQ ID NO: 320, SEQ ID NO: 321, SEQ ID NO: 322, SEQ ID NO: 323, SEQ ID NO: 324, SEQ ID NO: 325, SEQ ID NO: 326, SEQ ID NO: 327, SEQ ID NO: 328, SEQ ID NO: 329, SEQ ID NO: 332, SEQ ID NO: 333, SEQ ID NO: 334, SEQ ID NO: 335, SEQ ID NO: 336, SEQ ID NO: 337, SEQ ID NO: 338, SEQ ID NO: 339, SEQ ID NO: 340, SEQ ID NO: 341, SEQ ID NO: 342, SEQ ID NO: 343, SEQ ID NO: 344, SEQ ID NO: 345, SEQ ID NO: 346, SEQ ID NO: 347, SEQ ID NO: 348, SEQ ID NO: 349, SEQ ID NO: 350, SEQ ID NO: 351, SEQ ID NO: 352, SEQ ID NO: 353, SEQ ID NO: 354, SEQ ID NO: 355, SEQ ID NO: 356, SEQ ID NO: 357, SEQ ID NO: 358, SEQ ID NO: 359, SEQ ID NO: 360, SEQ ID NO: 361, SEQ ID NO: 362, SEQ ID NO: 363, SEQ ID NO: 364, SEQ ID NO: 365, SEQ ID NO: 366, SEQ ID NO: 367, SEQ ID NO: 368, SEQ ID NO: 369, SEQ ID NO: 371, SEQ ID NO: 372, SEQ ID NO: 373, SEQ ID NO: 374, SEQ ID NO: 375, SEQ ID NO: 376, and SEQ ID NO: 377;
(iv) wherein the NIN protein or the NLP protein is a NLP4 orthogroup protein, wherein the NLP4 orthogroup protein has at least 70% sequence identity, at least 75% sequence identity, at least 80% sequence identity, at least 85% sequence identity, at least 90% sequence identity, at least 95% sequence identity, at least 96% sequence identity, at least 97% sequence identity, at least 98% sequence identity, or at least 99% sequence identity to an amino acid sequence selected from the group consisting of SEQ ID NO: 378, SEQ ID NO: 379, SEQ ID NO: 380, SEQ ID NO: 381, SEQ ID NO: 382, SEQ ID NO: 383, SEQ ID NO: 384, SEQ ID NO: 385, SEQ ID NO: 386, SEQ ID NO: 387, SEQ ID NO: 388, SEQ ID NO: 389, SEQ ID NO: 390, SEQ ID NO: 391, SEQ ID NO: 392, SEQ ID NO: 393, SEQ ID NO: 394, SEQ ID NO: 395, SEQ ID NO: 396, SEQ ID NO: 397, SEQ ID NO: 398, SEQ ID NO: 399, SEQ ID NO: 400, SEQ ID NO: 401, SEQ ID NO: 402, SEQ ID NO: 403, SEQ ID NO: 404, SEQ ID NO: 405, SEQ ID NO: 406, SEQ ID NO: 408, SEQ ID NO: 409, SEQ ID NO: 410, SEQ ID NO: 411, SEQ ID NO: 412, SEQ ID NO: 413, SEQ ID NO: 414, SEQ ID NO: 415, SEQ ID NO: 417, SEQ ID NO: 418, SEQ ID NO: 419, SEQ ID NO: 420, SEQ ID NO: 421, SEQ ID NO: 422, SEQ ID NO: 423, SEQ ID NO: 424, SEQ ID NO: 425, SEQ ID NO: 426, SEQ ID NO: 427, SEQ ID NO: 428, SEQ ID NO: 429, SEQ ID NO: 430, SEQ ID NO: 431, SEQ ID NO: 432, SEQ ID NO: 433, SEQ ID NO: 434, SEQ ID NO: 435, SEQ ID NO: 436, SEQ ID NO: 437, SEQ ID NO: 438, SEQ ID NO: 439, SEQ ID NO: 440, SEQ ID NO: 441, SEQ ID NO: 442, SEQ ID NO: 443, SEQ ID NO: 444, SEQ ID NO: 445, SEQ ID NO: 446, SEQ ID NO: 447, SEQ ID NO: 448, SEQ ID NO: 449, SEQ ID NO: 450, SEQ ID NO: 451, SEQ ID NO: 452, SEQ ID NO: 453, SEQ ID NO: 455, SEQ ID NO: 456, SEQ ID NO: 457, SEQ ID NO: 458, SEQ ID NO: 459, SEQ ID NO: 460, SEQ ID NO: 461, SEQ ID NO: 462, SEQ ID NO: 463, SEQ ID NO: 464, SEQ ID NO: 465, SEQ ID NO: 466, SEQ ID NO: 467, SEQ ID NO: 468, SEQ ID NO: 469, SEQ ID NO: 470, SEQ ID NO: 471, SEQ ID NO: 472, SEQ ID NO: 473, SEQ ID NO: 474, SEQ ID NO: 475, SEQ ID NO: 476, SEQ ID NO: 477, SEQ ID NO: 478, SEQ ID NO: 479, SEQ ID NO: 480, SEQ ID NO: 481, SEQ ID NO: 482, SEQ ID NO: 483, SEQ ID NO: 484, SEQ ID NO: 485, SEQ ID NO: 486, SEQ ID NO: 487, SEQ ID NO: 488, SEQ ID NO: 489, SEQ ID NO: 490, SEQ ID NO: 491, SEQ ID NO: 492, SEQ ID NO: 493, SEQ ID NO: 494, SEQ ID NO: 495, SEQ ID NO: 496, SEQ ID NO: 497, SEQ ID NO: 498, SEQ ID NO: 499, SEQ ID NO: 500, SEQ ID NO: 501, SEQ ID NO: 502, SEQ ID NO: 504, SEQ ID NO: 505, SEQ ID NO: 506, SEQ ID NO: 507, SEQ ID NO: 508, SEQ ID NO: 509, SEQ ID NO: 510, SEQ ID NO: 511, SEQ ID NO: 512, SEQ ID NO: 513, SEQ ID NO: 514, SEQ ID NO: 515, SEQ ID NO: 516, SEQ ID NO: 517, SEQ ID NO: 518, SEQ ID NO: 519, SEQ ID NO: 520, SEQ ID NO: 521, SEQ ID NO: 522, SEQ ID NO: 523, and SEQ ID NO: 524; or
(v) wherein the NIN protein or the NLP protein is a basal NIN/NLP orthogroup protein, wherein the basal NIN/NLP orthogroup protein has at least 70% sequence identity, at least 75% sequence identity, at least 80% sequence identity, at least 85% sequence identity, at least 90% sequence identity, at least 95% sequence identity, at least 96% sequence identity, at least 97% sequence identity, at least 98% sequence identity, or at least 99% sequence identity to an amino acid sequence selected from the group consisting of SEQ ID NO: 525, SEQ ID NO: 526, SEQ ID NO: 527, SEQ ID NO: 528, SEQ ID NO: 529, SEQ ID NO: 530, SEQ ID NO: 531, SEQ ID NO: 532, SEQ ID NO: 533, SEQ ID NO: 534, SEQ ID NO: 535, SEQ ID NO: 536, SEQ ID NO: 537, SEQ ID NO: 538, SEQ ID NO: 539, SEQ ID NO: 540, SEQ ID NO: 541, SEQ ID NO: 542, SEQ ID NO: 543, SEQ ID NO: 544, SEQ ID NO: 545, SEQ ID NO: 546, SEQ ID NO: 547, SEQ ID NO: 548, SEQ ID NO: 549, and SEQ ID NO: 550.

28. A method of producing the genetically altered plant or part thereof of claim 1, comprising genetically modifying the plant or part thereof by transforming the plant or part thereof with one or more gene editing components that target an endogenous nuclear genome sequence between a cyclops binding site and a transcriptional start site of the nucleic acid encoding the NIN protein or the NLP protein and introduce one or more AuxREs.

29. The method of claim 28, wherein the one or more gene editing components comprise:
(a) a ribonucleoprotein complex that targets the nuclear genome sequence; a vector comprising a TALEN protein encoding sequence, wherein the TALEN protein targets the nuclear genome sequence;
(b) a vector comprising a ZFN protein encoding sequence, wherein the ZFN protein targets the nuclear genome sequence;
(c) an oligonucleotide donor (OND), wherein the OND targets the nuclear genome sequence; or
(d) a vector CRISPR/Cas enzyme encoding sequence and a targeting sequence, wherein the targeting sequence targets the nuclear genome sequence.

30. The method of claim 28, wherein the one or more AuxREs comprise a TGTCTC motif or a TGTCTN motif.

31. The method of claim 28, wherein the NIN protein or the NLP protein comprises an amino acid sequence with at least 80%, at least 85%, at least 90%, at least 91%, at least 92%, at least 93%, at least 94%, at least 95%, at least 96%, at least 97%, at least 98%, at least 99%, or 100% identity to SEQ ID NO: 649.

32. The method of claim 28,
(i) wherein the NIN protein has at least 70% sequence identity, at least 75% sequence identity, at least 80% sequence identity, at least 85% sequence identity, at least 90% sequence identity, at least 95% sequence identity, at least 96% sequence identity, at least 97% sequence identity, at least 98% sequence identity, or at least 99% sequence identity to an amino acid sequence selected from the group consisting of SEQ ID NO: 551, SEQ ID NO: 552, SEQ ID NO: 553, SEQ ID NO: 554, SEQ ID NO: 555, SEQ ID NO: 556, SEQ ID NO: 557, SEQ ID NO: 558, SEQ ID NO: 559, SEQ ID NO: 560, SEQ ID NO: 561, SEQ ID NO: 562, SEQ ID NO: 563, SEQ ID NO: 564, SEQ ID NO: 565, SEQ ID NO: 566, SEQ ID NO: 567, SEQ ID NO: 568, SEQ ID NO: 569, SEQ ID NO: 570, SEQ ID NO: 571, SEQ ID NO: 572, SEQ ID NO: 573, SEQ ID NO: 574, SEQ ID NO: 575, SEQ ID NO: 576, SEQ ID NO: 577, SEQ ID NO: 578, SEQ ID NO: 579, SEQ ID NO: 580, SEQ ID NO: 581, SEQ ID NO: 582, SEQ ID NO: 583, SEQ ID NO: 584, SEQ ID NO: 585, SEQ ID NO: 586, SEQ ID NO: 587, and SEQ ID NO: 588;
(ii) wherein the NIN protein or the NLP protein is a NIN/NLP1 orthogroup protein, wherein the NIN/NLP1 orthogroup protein has at least 70% sequence identity, at least 75% sequence identity, at least 80% sequence identity, at least 85% sequence identity, at least 90% sequence identity, at least 95% sequence identity, at least 96% sequence identity, at least 97% sequence identity, at least 98% sequence identity, or at least 99% sequence identity to an amino acid sequence selected from the group consisting of SEQ ID NO: 1, SEQ ID NO: 2, SEQ ID NO: 3, SEQ ID NO: 4, SEQ ID NO: 5, SEQ ID NO: 6, SEQ ID NO: 8, SEQ ID NO: 9, SEQ ID NO: 10, SEQ ID NO: 11, SEQ ID NO: 12, SEQ ID NO: 13, SEQ ID NO: 14, SEQ ID NO: 15, SEQ ID NO: 16, SEQ ID NO: 17, SEQ ID NO: 18, SEQ ID NO: 19, SEQ ID NO: 20, SEQ ID NO: 21, SEQ ID NO: 22, SEQ ID NO: 23, SEQ ID NO: 24, SEQ ID NO: 25, SEQ ID NO: 26, SEQ ID NO: 27, SEQ ID NO: 28, SEQ ID NO: 29, SEQ ID NO: 30, SEQ ID NO: 31, SEQ ID NO: 32, SEQ ID NO: 33, SEQ ID NO: 34, SEQ ID NO: 35, SEQ ID NO: 36, SEQ ID NO: 37, SEQ ID NO: 38, SEQ ID NO: 39, SEQ ID NO: 40, SEQ ID NO: 41, SEQ ID NO: 42, SEQ ID NO: 43, SEQ ID NO: 44, SEQ ID NO: 45, SEQ ID NO: 46, SEQ ID NO: 47, SEQ ID NO: 48, SEQ ID NO: 49, SEQ ID NO: 50, SEQ ID NO: 51, SEQ ID NO: 52, SEQ ID NO: 53, SEQ ID NO: 54, SEQ ID NO: 55, SEQ ID NO: 56, SEQ ID NO: 57, SEQ ID NO: 58, SEQ ID NO: 59, SEQ ID NO: 60, SEQ ID NO: 61, SEQ ID NO: 62, SEQ ID NO: 63, SEQ ID NO: 64, SEQ ID NO: 65, SEQ ID NO: 66, SEQ ID NO: 67, SEQ ID NO: 68, SEQ ID NO: 69, SEQ ID NO: 70, SEQ ID NO: 71, SEQ ID NO: 72, SEQ ID NO: 73, SEQ ID NO: 74, SEQ ID NO: 75, SEQ ID NO: 76, SEQ ID NO: 77, SEQ ID NO: 79, SEQ ID NO: 80, SEQ ID NO: 81, SEQ ID NO: 82, SEQ ID NO: 83, SEQ ID NO: 84, SEQ ID NO: 85, SEQ ID NO: 86, SEQ ID NO: 87, SEQ ID NO: 88, SEQ ID NO: 89, SEQ ID NO: 90, SEQ ID NO: 91, SEQ ID NO: 92, SEQ ID NO: 93, SEQ ID NO: 94, SEQ ID NO: 95, SEQ ID NO: 96, SEQ ID NO: 98, SEQ ID NO: 99, SEQ ID NO: 100, SEQ ID NO: 101, SEQ ID NO: 102, SEQ ID NO: 103, SEQ ID NO: 104, SEQ ID NO: 105, SEQ ID NO: 106, SEQ ID NO: 108, SEQ ID NO: 109, SEQ ID NO: 131, SEQ ID NO: 132, SEQ ID NO: 133, SEQ ID NO: 134, SEQ ID NO: 135, SEQ ID NO: 136, SEQ ID NO: 137, SEQ ID NO: 138, SEQ ID NO: 139, SEQ ID NO: 140, SEQ ID NO: 141, SEQ ID NO: 142, SEQ ID NO: 143, SEQ ID NO: 144, SEQ ID NO: 145, SEQ ID NO: 146, SEQ ID NO: 147, SEQ ID NO: 148, SEQ ID NO: 149, SEQ ID NO: 150, SEQ ID NO: 151, SEQ ID NO: 152, SEQ ID NO: 153, SEQ ID NO: 154, SEQ ID NO: 155, SEQ ID NO: 156, SEQ ID NO: 157, SEQ ID NO: 158, SEQ ID NO: 159, SEQ ID NO: 160, SEQ ID NO: 161, SEQ ID NO: 162, SEQ ID NO: 163, SEQ ID NO: 164, SEQ ID NO: 165, SEQ ID NO: 166, SEQ ID NO: 167, SEQ ID NO: 168, SEQ ID NO: 169, SEQ ID NO: 170, SEQ ID NO: 171, SEQ ID NO: 172, SEQ ID NO: 173, SEQ ID NO: 174, SEQ ID NO: 175, SEQ ID NO: 177, SEQ ID NO: 178, SEQ ID NO: 179, SEQ ID NO: 180, SEQ ID NO: 181, SEQ ID NO: 182, SEQ ID NO: 183, SEQ ID NO: 184, SEQ ID NO: 185, SEQ ID NO: 186, SEQ ID NO: 187, SEQ ID NO: 188, SEQ ID NO: 189, SEQ ID NO: 190, SEQ ID NO: 191, SEQ ID NO: 192, SEQ ID NO: 193, SEQ ID NO: 194, SEQ ID NO: 196, SEQ ID NO: 197, SEQ ID NO: 198, SEQ ID NO: 199, SEQ ID NO: 200, SEQ ID NO: 201, SEQ ID NO: 202, SEQ ID NO: 203, SEQ ID NO: 204, SEQ ID NO: 205, SEQ ID NO: 206, SEQ ID NO: 207, SEQ ID NO: 208, SEQ ID NO: 209, SEQ ID NO: 210, SEQ ID NO: 211, SEQ ID NO: 212, SEQ ID NO: 213, SEQ ID NO: 214, SEQ ID NO: 215, SEQ ID NO: 216, SEQ ID NO: 217, SEQ ID NO: 218, SEQ ID NO: 219, SEQ ID NO: 220, SEQ ID NO: 221, SEQ ID NO: 222, SEQ ID NO: 223, SEQ ID NO: 224, SEQ ID NO: 225, SEQ ID NO: 226, SEQ ID NO: 227, SEQ ID NO: 228, SEQ ID NO: 229, SEQ ID NO: 230, SEQ ID NO: 231, SEQ ID NO: 232, SEQ ID NO: 233, SEQ ID NO: 234, SEQ ID NO: 235, SEQ ID NO: 236, SEQ ID NO: 551, SEQ ID NO: 552, SEQ ID NO: 553, SEQ ID NO: 554, SEQ ID NO: 555, SEQ ID NO: 556, SEQ ID NO: 557, SEQ ID NO: 558, SEQ ID NO: 559, SEQ ID NO: 560, SEQ ID NO: 561, SEQ ID NO: 562, SEQ ID NO: 563, SEQ ID NO: 564, SEQ ID NO: 565, SEQ ID NO: 566, SEQ ID NO: 567, SEQ ID NO: 568, SEQ ID NO: 569, SEQ ID NO: 570, SEQ ID NO: 571, SEQ ID NO: 572, SEQ ID NO: 573, SEQ ID NO: 574, SEQ ID NO: 575, SEQ ID NO: 576, SEQ ID NO: 577, SEQ ID NO: 578, SEQ ID NO: 579, SEQ ID NO: 580, SEQ ID NO: 581, SEQ ID NO: 582, SEQ ID NO: 583, SEQ ID NO: 584, SEQ ID NO: 585, SEQ ID NO: 586, SEQ ID NO: 587, and SEQ ID NO: 588;
(iii) wherein the NIN protein or the NLP protein is a NLP2-3 orthogroup protein, wherein the NLP2-3 orthogroup protein has at least 70% sequence identity, at least 75% sequence identity, at least 80% sequence identity, at least 85% sequence identity, at least 90% sequence identity, at least 95% sequence identity, at least 96% sequence identity, at least 97% sequence identity, at least 98% sequence identity, or at least 99% sequence identity to an amino acid sequence selected from the group consisting of SEQ ID NO: 237, SEQ ID NO: 238, SEQ ID NO: 239, SEQ ID NO: 241, SEQ ID NO: 242, SEQ ID NO: 243, SEQ ID NO: 244, SEQ ID NO: 245, SEQ ID NO: 246, SEQ ID NO: 247, SEQ ID NO: 248, SEQ ID NO: 250, SEQ ID NO: 251, SEQ ID NO: 252, SEQ ID NO: 253, SEQ ID NO: 254, SEQ ID NO: 255, SEQ ID NO: 256, SEQ ID NO: 257, SEQ ID NO: 258, SEQ ID NO: 259, SEQ ID NO: 260, SEQ ID NO: 261, SEQ ID NO: 262, SEQ ID NO: 263, SEQ ID NO: 264, SEQ ID NO: 265, SEQ ID NO: 266, SEQ ID NO: 267, SEQ ID NO: 268, SEQ ID NO: 269, SEQ ID NO: 270, SEQ ID NO: 271, SEQ ID NO: 273, SEQ ID NO: 274, SEQ ID NO: 275, SEQ ID NO: 276, SEQ ID NO: 277, SEQ ID NO: 278, SEQ ID NO: 279, SEQ ID NO: 280, SEQ ID NO: 281, SEQ ID NO: 282, SEQ ID NO: 283, SEQ ID NO: 284, SEQ ID NO: 285, SEQ ID NO: 286, SEQ ID NO: 287, SEQ ID NO: 288, SEQ ID NO: 289, SEQ ID NO: 290, SEQ ID NO: 291, SEQ ID NO: 292, SEQ ID NO: 293, SEQ ID NO: 294, SEQ ID NO: 295, SEQ ID NO: 296, SEQ ID NO: 297, SEQ ID NO: 298, SEQ ID NO: 299, SEQ ID NO: 300, SEQ ID NO: 301, SEQ ID NO: 302, SEQ ID NO: 303, SEQ ID NO: 304, SEQ ID NO: 305, SEQ ID NO: 306, SEQ ID NO: 307, SEQ ID NO: 308, SEQ ID NO: 309, SEQ ID NO: 310, SEQ ID NO: 311, SEQ ID NO: 312, SEQ ID NO: 313, SEQ ID NO: 314, SEQ ID NO: 315, SEQ ID NO: 316, SEQ ID NO: 317, SEQ ID NO: 318, SEQ ID NO: 319, SEQ ID NO: 320, SEQ ID NO: 321, SEQ ID NO: 322, SEQ ID NO: 323, SEQ ID NO: 324, SEQ ID NO: 325, SEQ ID NO: 326, SEQ ID NO: 327, SEQ ID NO: 328, SEQ ID NO: 329, SEQ ID NO: 332, SEQ ID NO: 333, SEQ ID NO: 334, SEQ ID NO: 335, SEQ ID NO: 336, SEQ ID NO: 337, SEQ ID NO: 338, SEQ ID NO: 339, SEQ ID NO: 340, SEQ ID NO: 341, SEQ ID NO: 342, SEQ ID NO: 343, SEQ ID NO: 344, SEQ ID NO: 345, SEQ ID NO: 346, SEQ ID NO: 347, SEQ ID NO: 348, SEQ ID NO: 349, SEQ ID NO: 350, SEQ ID NO: 351, SEQ ID NO: 352, SEQ ID NO: 353, SEQ ID NO: 354, SEQ ID NO: 355, SEQ ID NO: 356, SEQ ID NO: 357, SEQ ID NO: 358, SEQ ID NO: 359, SEQ ID NO: 360, SEQ ID NO: 361, SEQ ID NO: 362, SEQ ID NO: 363, SEQ ID NO: 364, SEQ ID NO: 365, SEQ ID NO: 366, SEQ ID NO: 367, SEQ ID NO: 368, SEQ ID NO: 369, SEQ ID NO: 371, SEQ ID NO: 372, SEQ ID NO: 373, SEQ ID NO: 374, SEQ ID NO: 375, SEQ ID NO: 376, and SEQ ID NO: 377;
(iv) wherein the NIN protein or the NLP protein is a NLP4 orthogroup protein, wherein the NLP4 orthogroup protein has at least 70% sequence identity, at least 75% sequence identity, at least 80% sequence identity, at least 85% sequence identity, at least 90% sequence identity, at least 95% sequence identity, at least 96% sequence identity, at least 97% sequence identity, at least 98% sequence identity, or at least 99% sequence identity to an amino acid sequence selected from the group consisting of SEQ ID NO: 378, SEQ ID NO: 379, SEQ ID NO: 380, SEQ ID NO: 381, SEQ ID NO: 382, SEQ ID NO: 383, SEQ ID NO: 384, SEQ ID NO: 385, SEQ ID NO: 386, SEQ ID NO: 387, SEQ ID NO: 388, SEQ ID NO: 389, SEQ ID NO: 390, SEQ ID NO: 391, SEQ ID NO: 392, SEQ ID NO: 393, SEQ ID NO: 394, SEQ ID NO: 395, SEQ ID NO: 396, SEQ ID NO: 397, SEQ ID NO: 398, SEQ ID NO: 399, SEQ ID NO: 400, SEQ ID NO: 401, SEQ ID NO: 402, SEQ ID NO: 403, SEQ ID NO: 404, SEQ ID NO: 405, SEQ ID NO: 406, SEQ ID NO: 408, SEQ ID NO: 409, SEQ ID NO: 410, SEQ ID NO: 411, SEQ ID NO: 412, SEQ ID NO: 413, SEQ ID NO: 414, SEQ ID NO: 415, SEQ ID NO: 417, SEQ ID NO: 418, SEQ ID NO: 419, SEQ ID NO: 420, SEQ ID NO: 421, SEQ ID NO: 422, SEQ ID NO: 423, SEQ ID NO: 424, SEQ ID NO: 425, SEQ ID NO: 426, SEQ ID NO: 427, SEQ ID NO: 428, SEQ ID NO: 429, SEQ ID NO: 430, SEQ ID NO: 431, SEQ ID NO: 432, SEQ ID NO: 433, SEQ ID NO: 434, SEQ ID NO: 435, SEQ ID NO: 436, SEQ ID NO: 437, SEQ ID NO: 438, SEQ ID NO: 439, SEQ ID NO: 440, SEQ ID NO: 441, SEQ ID NO: 442, SEQ ID NO: 443, SEQ ID NO: 444, SEQ ID NO: 445, SEQ ID NO: 446, SEQ ID NO: 447, SEQ ID NO: 448, SEQ ID NO: 449, SEQ ID NO: 450, SEQ ID NO: 451, SEQ ID NO: 452, SEQ ID NO: 453, SEQ ID NO: 455, SEQ ID NO: 456, SEQ ID NO: 457, SEQ ID NO: 458, SEQ ID NO: 459, SEQ ID NO: 460, SEQ ID NO: 461, SEQ ID NO: 462, SEQ ID NO: 463, SEQ ID NO: 464, SEQ ID NO: 465, SEQ ID NO: 466, SEQ ID NO: 467, SEQ ID NO: 468, SEQ ID NO: 469, SEQ ID NO: 470, SEQ ID NO: 471, SEQ ID NO: 472, SEQ ID NO: 473, SEQ ID NO: 474, SEQ ID NO: 475, SEQ ID NO: 476, SEQ ID NO: 477, SEQ ID NO: 478, SEQ ID NO: 479, SEQ ID NO: 480, SEQ ID NO: 481, SEQ ID NO: 482, SEQ ID NO: 483, SEQ ID NO: 484, SEQ ID NO: 485, SEQ ID NO: 486, SEQ ID NO: 487, SEQ ID NO: 488, SEQ ID NO: 489, SEQ ID NO: 490, SEQ ID NO: 491, SEQ ID NO: 492, SEQ ID NO: 493, SEQ ID NO: 494, SEQ ID NO: 495, SEQ ID NO: 496, SEQ ID NO: 497, SEQ ID NO: 498, SEQ ID NO: 499, SEQ ID NO: 500, SEQ ID NO: 501, SEQ ID NO: 502, SEQ ID NO: 504, SEQ ID NO: 505, SEQ ID NO: 506, SEQ ID NO: 507, SEQ ID NO: 508, SEQ ID NO: 509, SEQ ID NO: 510, SEQ ID NO: 511, SEQ ID NO: 512, SEQ ID NO: 513, SEQ ID NO: 514, SEQ ID NO: 515, SEQ ID NO: 516, SEQ ID NO: 517, SEQ ID NO: 518, SEQ ID NO: 519, SEQ ID NO: 520, SEQ ID NO: 521, SEQ ID NO: 522, SEQ ID NO: 523, and SEQ ID NO: 524; or
(v) wherein the NIN protein or the NLP protein is a basal NIN/NLP orthogroup protein, wherein the basal NIN/NLP orthogroup protein has at least 70% sequence identity, at least 75% sequence identity, at least 80% sequence identity, at least 85% sequence identity, at least 90% sequence identity, at least 95% sequence identity, at least 96% sequence identity, at least 97% sequence identity, at least 98% sequence identity, or at least 99% sequence identity to an amino acid sequence selected from the group consisting of SEQ ID NO: 525, SEQ ID NO: 526, SEQ ID NO: 527, SEQ ID NO: 528, SEQ ID NO: 529, SEQ ID NO: 530, SEQ ID NO: 531, SEQ ID NO: 532, SEQ ID NO: 533, SEQ ID NO: 534, SEQ ID NO: 535, SEQ ID NO: 536, SEQ ID NO: 537, SEQ ID NO: 538, SEQ ID NO: 539, SEQ ID NO: 540, SEQ ID NO: 541, SEQ ID NO: 542, SEQ ID NO: 543, SEQ ID NO: 544, SEQ ID NO: 545, SEQ ID NO: 546, SEQ ID NO: 547, SEQ ID NO: 548, SEQ ID NO: 549, and SEQ ID NO: 550.

33. An expression vector, isolated DNA molecule, or recombinant nucleic acid comprising a nucleic acid sequence comprising one or more, two or more, three or more, four or more, five or more, six or more, seven or more, eight or more, nine or more, ten or more, eleven or more, twelve or more, thirteen or more, fourteen or more, fifteen or more, sixteen or more, seventeen or more, eighteen or more, nineteen or more, twenty or more, twenty-one or more, twenty-two or more, twenty-three or more, or twenty-four or more AuxREs from an endogenous plant promoter, or a synthetic promoter comprising one or more, two or more, three or more, four or more, six or more, seven or more, eight or more, nine or more, ten or more, eleven or more, twelve or more, thirteen or more, fourteen or more, fifteen or more, sixteen or more, seventeen or more, eighteen or more, nineteen or more, twenty or more, twenty-one or more, twenty-two or more, twenty-three or more, or twenty-four or more AuxREs.

34. The expression vector, isolated DNA molecule, or recombinant nucleic acid of claim 33, wherein the one or more, two or more, three or more, four or more, five or more, six or more, seven or more, eight or more, nine or more, ten or more, eleven or more, twelve or more, thirteen or more, fourteen or more, fifteen or more, sixteen or more, seventeen or more, eighteen or more, nineteen or more, twenty or more, twenty-one or more, twenty-two or more, twenty-three or more, or twenty-four or more AuxREs are operably linked to a second nucleic acid sequence encoding a NIN protein or a NLP protein.

35. The expression vector, isolated DNA molecule, or recombinant nucleic acid of claim 33, wherein the one or more AuxREs comprise a TGTCTC motif or a TGTCTN motif.

36. The expression vector, isolated DNA molecule, or recombinant nucleic acid of claim 34, wherein the NIN protein or the NLP protein comprises an amino acid sequence with at least 80%, at least 85%, at least 90%, at least 91%, at least 92%, at least 93%, at least 94%, at least 95%, at least 96%, at least 97%, at least 98%, at least 99%, or 100% identity to SEQ ID NO: 649.

37. The expression vector, isolated DNA molecule, or recombinant nucleic acid of claim 34,
(i) wherein the NIN protein or NLP protein is a NIN protein, wherein the NIN protein has at least 70% sequence identity, at least 75% sequence identity, at least 80% sequence identity, at least 85% sequence identity, at least 90% sequence identity, at least 95% sequence identity, at least 96% sequence identity, at least 97% sequence identity, at least 98% sequence identity, or at least 99% sequence identity to an amino acid sequence selected from the group consisting of SEQ ID NO: 551, SEQ ID NO: 552, SEQ ID NO: 553, SEQ ID NO: 554, SEQ ID NO: 555, SEQ ID NO: 556, SEQ ID NO: 557, SEQ ID NO: 558, SEQ ID NO: 559, SEQ ID NO: 560, SEQ ID NO: 561, SEQ ID NO: 562, SEQ ID NO: 563, SEQ ID NO: 564, SEQ ID NO: 565, SEQ ID NO: 566, SEQ ID NO: 567, SEQ ID NO: 568, SEQ ID NO: 569, SEQ ID NO: 570, SEQ ID NO: 571, SEQ ID NO: 572, SEQ ID NO: 573, SEQ ID NO: 574, SEQ ID NO: 575, SEQ ID NO: 576, SEQ ID NO: 577, SEQ ID NO: 578, SEQ ID NO: 579, SEQ ID NO: 580, SEQ ID NO: 581, SEQ ID NO: 582, SEQ ID NO: 583, SEQ ID NO: 584, SEQ ID NO: 585, SEQ ID NO: 586, SEQ ID NO: 587, and SEQ ID NO: 588;
(ii) wherein the NIN protein or NLP protein is a NIN/NLP1 orthogroup protein, wherein the NIN/NLP1 orthogroup protein has at least 70% sequence identity, at least 75% sequence identity, at least 80% sequence identity, at least 85% sequence identity, at least 90% sequence identity, at least 95% sequence identity, at least 96% sequence identity, at least 97% sequence identity, at least 98% sequence identity, or at least 99% sequence identity to an amino acid sequence selected from the group consisting of SEQ ID NO: 1, SEQ ID NO: 2, SEQ ID NO: 3, SEQ ID NO: 4, SEQ ID NO: 5, SEQ ID NO: 6, SEQ ID NO: 8, SEQ ID NO: 9, SEQ ID NO: 10, SEQ ID NO: 11, SEQ ID NO: 12, SEQ ID NO: 13, SEQ ID NO: 14, SEQ ID NO: 15, SEQ ID NO: 16, SEQ ID NO: 17, SEQ ID NO: 18, SEQ ID NO: 19, SEQ ID NO: 20, SEQ ID NO: 21, SEQ ID NO: 22; SEQ ID NO: 23, SEQ ID NO: 24, SEQ ID NO: 25, SEQ ID NO: 26, SEQ ID NO: 27, SEQ ID NO: 28, SEQ ID NO: 29, SEQ ID NO: 30, SEQ ID NO: 31, SEQ ID NO: 32, SEQ ID NO: 33, SEQ ID NO: 34, SEQ ID NO: 35, SEQ ID NO: 36, SEQ ID NO: 37, SEQ ID NO: 38, SEQ ID NO: 39, SEQ ID NO: 40, SEQ ID NO: 41, SEQ ID NO: 42, SEQ ID NO: 43, SEQ ID NO: 44, SEQ ID NO: 45, SEQ ID NO: 46, SEQ ID NO: 47, SEQ ID NO: 48, SEQ ID NO: 49, SEQ ID NO: 50, SEQ ID NO: 51, SEQ ID NO: 52, SEQ ID NO: 53, SEQ ID NO: 54, SEQ ID NO: 55, SEQ ID NO: 56, SEQ ID NO: 57, SEQ ID NO: 58, SEQ ID NO: 59, SEQ ID NO: 60, SEQ ID NO: 61, SEQ ID NO: 62, SEQ ID NO: 63, SEQ ID NO: 64, SEQ ID NO: 65, SEQ ID NO: 66, SEQ ID NO: 67, SEQ ID NO: 68, SEQ ID NO: 69, SEQ ID NO: 70, SEQ ID NO: 71, SEQ ID NO: 72, SEQ ID NO: 73, SEQ ID NO: 74, SEQ ID NO: 75, SEQ ID NO: 76, SEQ ID NO: 77, SEQ ID NO: 78, SEQ ID NO: 79, SEQ ID NO: 80, SEQ ID NO: 81, SEQ ID NO: 82, SEQ ID NO: 83, SEQ ID NO: 84, SEQ ID NO: 85, SEQ ID NO: 86, SEQ ID NO: 87, SEQ ID NO: 88, SEQ ID NO: 89, SEQ ID NO: 90, SEQ ID NO: 91, SEQ ID NO: 92, SEQ ID NO: 93, SEQ ID NO: 94, SEQ ID NO: 95, SEQ ID NO: 96, SEQ ID NO: 98, SEQ ID NO: 99, SEQ ID NO: 100, SEQ ID NO: 101, SEQ ID NO: 102, SEQ ID NO: 103, SEQ ID NO: 104, SEQ ID NO: 105, SEQ ID NO: 106, SEQ ID NO: 108, SEQ ID NO: 109, SEQ ID NO: 131, SEQ ID NO: 132, SEQ ID NO: 133, SEQ ID NO: 134, SEQ ID NO: 135, SEQ ID NO: 136, SEQ ID NO: 137, SEQ ID NO: 138, SEQ ID NO: 139, SEQ ID NO: 140, SEQ ID NO: 141, SEQ ID NO: 142, SEQ ID NO: 143, SEQ ID NO: 144, SEQ ID NO: 145, SEQ ID NO: 146, SEQ ID NO: 147, SEQ ID NO: 148, SEQ ID NO: 149, SEQ ID NO: 150, SEQ ID NO: 151, SEQ ID NO: 152, SEQ ID NO: 153, SEQ ID NO: 154, SEQ ID NO: 155, SEQ ID NO: 156, SEQ ID NO: 157, SEQ ID NO: 158, SEQ ID NO: 159, SEQ ID NO: 160, SEQ ID NO: 161, SEQ ID NO: 162, SEQ ID NO: 163, SEQ ID NO: 164, SEQ ID NO: 165, SEQ ID NO: 166, SEQ ID NO: 167, SEQ ID NO: 168, SEQ ID NO: 169, SEQ ID NO: 170, SEQ ID NO: 171, SEQ ID NO: 172, SEQ ID NO: 173, SEQ ID NO: 174, SEQ ID NO: 175, SEQ ID NO: 177, SEQ ID NO: 178, SEQ ID NO: 179, SEQ ID NO: 180, SEQ ID NO: 181, SEQ ID NO: 182, SEQ ID NO: 183, SEQ ID NO: 184, SEQ ID NO: 185, SEQ ID NO: 186, SEQ ID NO: 187, SEQ ID NO: 188, SEQ ID NO: 189, SEQ ID NO: 190, SEQ ID NO: 191, SEQ ID NO: 192, SEQ ID NO: 193, SEQ ID NO: 194, SEQ ID NO: 196, SEQ ID NO: 197, SEQ ID NO: 198, SEQ ID NO: 199, SEQ ID NO: 200, SEQ ID NO: 201, SEQ ID NO: 202, SEQ ID NO: 203, SEQ ID NO: 204, SEQ ID NO: 205, SEQ ID NO: 206, SEQ ID NO: 207, SEQ ID NO: 208, SEQ ID NO: 209, SEQ ID NO: 210, SEQ ID NO: 211, SEQ ID NO: 212, SEQ ID NO: 213, SEQ ID NO: 214, SEQ ID NO: 215, SEQ ID NO: 216, SEQ ID NO: 217, SEQ ID NO: 218, SEQ ID NO: 219, SEQ ID NO: 220, SEQ ID NO: 221, SEQ ID NO: 222, SEQ ID NO: 223, SEQ ID NO: 224, SEQ ID NO: 225, SEQ ID NO: 226, SEQ ID NO: 227, SEQ ID NO: 228, SEQ ID NO: 229, SEQ ID NO: 230, SEQ ID NO: 231, SEQ ID NO: 232, SEQ ID NO: 233, SEQ ID NO: 234, SEQ ID NO: 235, SEQ ID NO: 236, SEQ ID NO: 551, SEQ ID NO: 552, SEQ ID NO: 553, SEQ ID NO: 554, SEQ ID NO: 555, SEQ ID NO: 556, SEQ ID NO: 557, SEQ ID NO: 558, SEQ ID NO: 559, SEQ ID NO: 560, SEQ ID NO: 561, SEQ ID NO: 562, SEQ ID NO: 563, SEQ ID NO: 564, SEQ ID NO: 565, SEQ ID NO: 566, SEQ ID NO: 567, SEQ ID NO: 568, SEQ ID NO: 569, SEQ ID NO: 570, SEQ ID NO: 571, SEQ ID NO: 572, SEQ ID NO: 573, SEQ ID NO: 574, SEQ ID NO: 575, SEQ ID NO: 576, SEQ ID NO: 577, SEQ ID NO: 578, SEQ ID NO: 579, SEQ ID NO: 580, SEQ ID NO: 581, SEQ ID NO: 582, SEQ ID NO: 583, SEQ ID NO: 584, SEQ ID NO: 585, SEQ ID NO: 586, SEQ ID NO: 587, and SEQ ID NO: 588;
(iii) wherein the NIN protein or NLP protein is a NLP2-3 orthogroup protein, wherein the NLP2-3 orthogroup protein has at least 70% sequence identity, at least 75% sequence identity, at least 80% sequence identity, at least 85% sequence identity, at least 90% sequence identity, at least 95% sequence identity, at least 96% sequence identity, at least 97% sequence identity, at least 98% sequence identity, or at least 99% sequence identity to an amino acid sequence selected from the group consisting of SEQ ID NO: 237, SEQ ID NO: 238, SEQ ID NO: 239, SEQ ID NO: 241, SEQ ID NO: 242, SEQ ID NO: 243, SEQ ID NO: 244, SEQ ID NO: 245, SEQ ID NO: 246, SEQ ID NO: 247, SEQ ID NO: 248, SEQ ID NO: 250, SEQ ID NO: 251, SEQ ID NO: 252, SEQ ID NO: 253, SEQ ID NO: 254, SEQ ID NO: 255, SEQ ID NO: 256, SEQ ID NO: 257, SEQ ID NO: 258, SEQ ID NO: 259, SEQ ID NO: 260, SEQ ID NO: 261, SEQ ID NO: 262, SEQ ID NO: 263, SEQ ID NO: 264, SEQ ID NO: 265, SEQ ID NO: 266, SEQ ID NO: 267, SEQ ID NO: 268, SEQ ID NO: 269, SEQ ID NO: 270, SEQ ID NO: 271, SEQ ID NO: 273, SEQ ID NO: 274, SEQ ID NO: 275, SEQ ID NO: 276, SEQ ID NO: 277, SEQ ID NO: 278, SEQ ID NO: 279, SEQ ID NO: 280, SEQ ID NO: 281, SEQ ID NO: 282, SEQ ID NO: 283, SEQ ID NO: 284, SEQ ID NO: 285, SEQ ID NO: 286, SEQ ID NO: 287, SEQ ID NO: 288, SEQ ID NO: 289, SEQ ID NO: 290, SEQ ID NO: 291, SEQ ID NO: 292, SEQ ID NO: 293, SEQ ID NO: 294, SEQ ID NO: 295, SEQ ID NO: 296, SEQ ID NO: 297, SEQ ID NO: 298, SEQ ID NO: 299, SEQ ID NO: 300, SEQ ID NO: 301, SEQ ID NO: 302, SEQ ID NO: 303, SEQ ID NO: 304, SEQ ID NO: 305, SEQ ID NO: 306, SEQ ID NO: 307, SEQ ID NO: 308, SEQ ID NO: 309, SEQ ID NO: 310, SEQ ID NO: 311, SEQ ID NO: 312, SEQ ID NO: 313, SEQ ID NO: 314, SEQ ID NO: 315, SEQ ID NO: 316, SEQ ID NO: 317, SEQ ID NO: 318, SEQ ID NO: 319, SEQ ID NO: 320, SEQ ID NO: 321, SEQ ID NO: 322, SEQ ID NO: 323, SEQ ID NO: 324, SEQ ID NO: 325, SEQ ID NO: 326, SEQ ID NO: 327, SEQ ID NO: 328, SEQ ID NO: 329, SEQ ID NO: 332, SEQ ID NO: 333, SEQ ID NO: 334, SEQ ID NO: 335, SEQ ID NO: 336, SEQ ID NO: 337, SEQ ID NO: 338, SEQ ID NO: 339, SEQ ID NO: 340, SEQ ID NO: 341, SEQ ID NO: 342, SEQ ID NO: 343, SEQ ID NO: 344, SEQ ID NO: 345, SEQ ID NO: 346, SEQ ID NO: 347, SEQ ID NO: 348, SEQ ID NO: 349, SEQ ID NO: 350, SEQ ID NO: 351, SEQ ID NO: 352, SEQ ID NO: 353, SEQ ID NO: 354, SEQ ID NO: 355, SEQ ID NO: 356, SEQ ID NO: 357, SEQ ID NO: 358, SEQ ID NO: 359, SEQ ID NO: 360, SEQ ID NO: 361, SEQ ID NO: 362, SEQ ID NO: 363, SEQ ID NO: 364, SEQ ID NO: 365, SEQ ID NO: 366, SEQ ID NO: 367, SEQ ID NO: 368, SEQ ID NO: 369, SEQ ID NO: 371, SEQ ID NO: 372, SEQ ID NO: 373, SEQ ID NO: 374, SEQ ID NO: 375, SEQ ID NO: 376, and SEQ ID NO: 377;
(iv) wherein the NIN protein or NLP protein is an NLP4 orthogroup protein, wherein the NLP4 orthogroup protein has at least 70% sequence identity, at least 75% sequence identity, at least 80% sequence identity, at least 85% sequence identity, at least 90% sequence identity, at least 95% sequence identity, at least 96% sequence identity, at least 97% sequence identity, at least 98% sequence identity, or at least 99% sequence identity to an amino acid sequence selected from the group consisting of SEQ ID NO: 378, SEQ ID NO: 379, SEQ ID NO: 380, SEQ ID NO: 381, SEQ ID NO: 382, SEQ ID NO: 383, SEQ ID NO: 384, SEQ ID NO: 385, SEQ ID NO: 386, SEQ ID NO: 387, SEQ ID NO: 388, SEQ ID NO: 389, SEQ ID NO: 390, SEQ ID NO: 391, SEQ ID NO: 392, SEQ ID NO: 393, SEQ ID NO: 394, SEQ ID NO: 395, SEQ ID NO: 396, SEQ ID NO: 397, SEQ ID NO: 398, SEQ ID NO: 399, SEQ ID NO: 400, SEQ ID NO: 401, SEQ ID NO: 402, SEQ ID NO: 403, SEQ ID NO: 404, SEQ ID NO: 405, SEQ ID NO: 406, SEQ ID NO: 408, SEQ ID NO: 409, SEQ ID NO: 410, SEQ ID NO: 411, SEQ ID NO: 412, SEQ ID NO: 413, SEQ ID NO: 414, SEQ ID NO: 415, SEQ ID NO: 417, SEQ ID NO: 418, SEQ ID NO: 419, SEQ ID NO: 420, SEQ ID NO: 421, SEQ ID NO: 422, SEQ ID NO: 423, SEQ ID NO: 424, SEQ ID NO: 425, SEQ ID NO: 426, SEQ ID NO: 427, SEQ ID NO: 428, SEQ ID NO: 429, SEQ ID NO: 430, SEQ ID NO: 431, SEQ ID NO: 432, SEQ ID NO: 433, SEQ ID NO: 434, SEQ ID NO: 435, SEQ ID NO: 436, SEQ ID NO: 437, SEQ ID NO: 438, SEQ ID NO: 439, SEQ ID NO: 440, SEQ ID NO: 441, SEQ ID NO: 442, SEQ ID NO: 443, SEQ ID NO: 444, SEQ ID NO: 445, SEQ ID NO: 446, SEQ ID NO: 447, SEQ ID NO: 448, SEQ ID NO: 449, SEQ ID NO: 450, SEQ ID NO: 451, SEQ ID NO: 452, SEQ ID NO: 453, SEQ ID NO: 455, SEQ ID NO: 456, SEQ ID NO: 457, SEQ ID NO: 458, SEQ ID NO: 459, SEQ ID NO: 460, SEQ ID NO: 461, SEQ ID NO: 462, SEQ ID NO: 463, SEQ ID NO: 464, SEQ ID NO: 465, SEQ ID NO: 466, SEQ ID NO: 467, SEQ ID NO: 468, SEQ ID NO: 469, SEQ ID NO: 470, SEQ ID NO: 471, SEQ ID NO: 472, SEQ ID NO: 473, SEQ ID NO: 474, SEQ ID NO: 475, SEQ ID NO: 476, SEQ ID NO: 477, SEQ ID NO: 478, SEQ ID NO: 479, SEQ ID NO: 480, SEQ ID NO: 481, SEQ ID NO: 482, SEQ ID NO: 483, SEQ ID NO: 484, SEQ ID NO: 485, SEQ ID NO: 486, SEQ ID NO: 487, SEQ ID NO: 488, SEQ ID NO: 489, SEQ ID NO: 490, SEQ ID NO: 491, SEQ ID NO: 492, SEQ ID NO: 493, SEQ ID NO: 494, SEQ ID NO: 495, SEQ ID NO: 496, SEQ ID NO: 497, SEQ ID NO: 498, SEQ ID NO: 499, SEQ ID NO: 500, SEQ ID NO: 501, SEQ ID NO: 502, SEQ ID NO: 504, SEQ ID NO: 505, SEQ ID NO: 506, SEQ ID NO: 507, SEQ ID NO: 508, SEQ ID NO: 509, SEQ ID NO: 510, SEQ ID NO: 511, SEQ ID NO: 512, SEQ ID NO: 513, SEQ ID NO: 514, SEQ ID NO: 515, SEQ ID NO: 516, SEQ ID NO: 517, SEQ ID NO: 518, SEQ ID NO: 519, SEQ ID NO: 520, SEQ ID NO: 521, SEQ ID NO: 522, SEQ ID NO: 523, and SEQ ID NO: 524; or
(v) wherein the NIN protein or NLP protein is a basal NIN/NLP orthogroup protein, wherein the basal NIN/NLP orthogroup protein has at least 70% sequence identity, at least 75% sequence identity, at least 80% sequence identity, at least 85% sequence identity, at least 90% sequence identity, at least 95% sequence identity, at least 96% sequence identity, at least 97% sequence identity, at least 98% sequence identity, or at least 99% sequence identity to an amino acid sequence selected from the group consisting of SEQ ID NO: 525, SEQ ID NO: 526, SEQ ID NO: 527, SEQ ID NO: 528, SEQ ID NO: 529, SEQ ID NO: 530, SEQ ID NO: 531, SEQ ID NO: 532, SEQ ID NO: 533, SEQ ID NO: 534, SEQ ID NO: 535, SEQ ID NO: 536, SEQ ID NO: 537, SEQ ID NO: 538, SEQ ID NO: 539, SEQ ID NO: 540, SEQ ID NO: 541, SEQ ID NO: 542, SEQ ID NO: 543, SEQ ID NO: 544, SEQ ID NO: 545, SEQ ID NO: 546, SEQ ID NO: 547, SEQ ID NO: 548, SEQ ID NO: 549, and SEQ ID NO: 550.

38. A bacterial cell or an Agrobacterium cell comprising the expression vector, isolated DNA molecule, or recombinant nucleic acid of claim 33.

39. A genetically modified plant, plant part, plant cell, or seed comprising the expression vector, isolated DNA molecule, or recombinant nucleic acid of claim 33.

40. A composition or kit comprising the expression vector, isolated DNA molecule, or recombinant nucleic acid of claim 33.

41. (canceled)

42. A method of inducing symbiotic organogenesis, inducing symbiotic organogenesis in the absence of rhizobial bacteria recognized by the plant, and/or inducing infection of a symbiotic organ comprising introducing a genetic alteration via the expression vector, isolated DNA molecule, or recombinant nucleic acid of claim 33.

43. (canceled)

44. (canceled)

The application's sequence listing, which the Patent Office published only in electronic form, follows.

SEQUENCE LISTING (649 sequences)

SEQ ID NO: 1 - protein, 767 aa, Arabidopsis thaliana
MVGPFKKILHAHNQRFPPSSSSSLDPVVDDSSRKQTRIILSYLLHLSLSLHITYSLCLLHFFFGSSNPFSPMEESNNSAVVDFPDNFMDQLLWEECWEEEATQHDQALSSPSGLKERVACAMGHLQEVMGERELLIQLWVPVETRSGRVLSTEEQPYSINTFSQSQSLALYRDASAGYSFAAEVGSEQLVGLPGRVFLRRMPEWTPDVRFFRKEEYPRIGYARRYQVRATLALPLFQGTSGNCVAVMEMVTTHRNLEYASQLSTICHALEAFDLRTSQTSIVPASLKVTSSSSSSSRTEVASILQGICSSHGLPLAVTWGHQDSSSCLSALISASYAADHGSRCFLAACSEHHLLGGEGIAGRAFATKKQCFATDVAIFSKWSYPLSHYAKMFDLHAALAVPILTRGNRTVQFVLELFFPRDCLDIQTHSLTLASQLKLRFQSSPHLMVDDNQIAEEVRDAATPPLTQEDPKGKQVSFSFSSASSLENRKRKTKAEKDITLDTLRQHFAGSLKDAAKNIGVCPTTLKRICRQNGISRWPSRKIKKVGHSLRKLQVVMDSVEGVQGSLHLASFYSSFPQLQSSSSSSFPFINPTQTVHVPPKSPPSSSGSQSSSGSSTCCSSEEQQLGGFQKPALSHPQLLTLSSMHEDQRPVRVTSSLPPLPSATTPRKAKDGMKVKAMFGDSMLRMSLLPHSRLTDLRREIAKRFGMDDVLRSNFSLKYLDDDQEWVLLTCDADLEECIQVYKSSSLKETIRILVHHPLSRPSFGS

SEQ ID NO: 2 - protein, 844 aa, Arabidopsis thaliana
MEDSFLQSENVVMDADFMDGLLLDGCWLETTDGSEFLNIAPSTSSVSPFDPTSFMWSPTQDTSALCTSGVVSQMYGQDCVERSSLDEFQWNKRWWIGPGGGGSSVTERLVQAVEHIKDYTTARGSLIQLWVPVNRGGKRVLTTKEQPFSHDPLCQRLANYREISVNYHFSAEQDDSKALAGLPGRVFLGKLPEWTPDVRFFKSEEYPRVHHAQDCDVRGTLAIPVFEQGSKICLGVIEVVMTTEMVKLRPELESICRALQAVDLRSTELPIPPSLKGCDLSYKAALPEIRNLLRCACETHKLPLAQTWVSCQQQNKSGCRHNDENYIHCVSTIDDACYVGDPTVREFHEACSEHHLLKGQGVAGQAFLTNGPCFSSDVSNYKKSEYPLSHHANMYGLHGAVAIRLRCIHTGSADFVLEFFLPKDCDDLEEQRKMLNALSTIMAHVPRSLRTVTDKELEEESEVIEREEIVTPKIENASELHGNSPWNASLEEIQRSNNTSNPQNLGLVFDGGDKPNDGFGLKRGFDYTMDSNVNESSTFSSGGFSMMAEKKRTKADKTITLDVLRQYFAGSLKDAAKNIGVCPTTLKRICRQHGIQRWPSRKIKKVGHSLQKIQRVIDSVQGVSGPLPIGSFYANFPNLVSQSQEPSQQAKTTPPPPPPVQLAKSPVSSYSHSSNSSQCCSSETQLNSGATTDPPSTDVGGALKKTSSEIELQSSSLDETILTLSSLENIPQGTNLLSSQDDDFLRIKVSYGEEKIRLRMRNSRRLRDLLWEIGKRFSIEDMSRYDLKYLDEDNEWVLLTCDEDVEECVDVCRTTPSHTIKLLLQASSHHFPERSSATEYSLWH

SEQ ID NO: 3 - protein, 909 aa, Arabidopsis thaliana
MEDDGGSDGGEGNGGFSPNSSFGAFADTAMDLDFMDELLFDGCWLETTDSKSLKQTEQSPSASTAMNDNSPFLCFGENPSQDNFSNEETERMFPQAEKFLLEEAEVGKSWWIAPSASEGPSSSVKERLLQAISGLNEAVQDKDFLVQIWVPIQQEGKSFLTTWAQPHLFNQEYSSLAEYRHVSETYNFPADEGMKDFVGLPGRVFLQKFPEWTPDVRFFRRDEYPRIKEAQKCDVRGSLALPVFERGSGTCLGVVEIVTTTQKMNYRQELEKMCKALEAVDLRSSSNLNTPSSEFLQVYSDFYCAALPEIKDFLATICRSYDFPLALSWAPCARQGKVGSRHSDENFSECVSTIDSACSVPDEQSKSFWEACSEHHLLQGEGIVGKAFEATKLFFVPEVATFSKTNYPLAHHAKISGLHAALAVPLKSKSGLVEFVLEFFFPKACLDTEAQQEMLKSLCVTLQQDFRSSNLFIKDLELEVVLPVRETMLFSENLLCGAETVESLTEIQMQESSWIAHMIKANEKGKDVSLSWEYQKEDPKELSSGRENSQLDPVPNNVPLEAEQLQQASTPGLRVDIGPSTESASTGGGNMLSSRRPGEKKRAKTEKTIGLEVLRQYFAGSLKDAAKSIGVCPTTLKRICRQHGIMRWPSRKIKKVGHSLKKLQLVMDSVQGAQGSIQLDSFYTSFPELNSPNMSSNGPSLKSNEQPSHLNAQTDNGIMAEENPRSPSSSCSKSSGSSNNNENTGNILVAEDADAVLKRAHSEAQLHNVNQEETKCLARTQSHKTFKEPLVLDNSSPLTGSSNTSLRARGAIKVKATFGEARIRFTLLPSWGFAELKQEIARRFNIDDISWFDLKYLDDDKEWVLLTCEADLVECIDIYRLTQTHTIKISLNEASQVKLSGSFGNTGLS

SEQ ID NO: 4 - protein, 963 aa, Arabidopsis thaliana
MEGGRGGGDGNFLPNSNFGVFSDSAMDMDFMDELLFDGCWLETTDGKSLKQTMGQQVSDSTTMNDNNNNSYLYGYQYAENLSQDHISNEETGRKFPPIPPGFLKIEDLSNQVPFDQSAVMSSAQAEKFLLEESEGGRRYWIAPRTSQGPSSSVKERLVQAIEGLNEEVQDKDFLIQIWLPIQQEGKNFLTTSEQPHFFNPKYSSLKRYRDVSVAYNFLADEDSKESVGLPGRVFLKKLPEWTPDVRFFRSEEYPRIKEAEQCDVRGSLALPVFERGSGTCLGVVEIVTTTQKMNYRPELDNICKALESVNLRSSRSLNPPSREFLQVYNEFYYAALPEVSEFLTLVCRVYDLPLALTWAPCARQGKVGSRHSDENFSECVSTVDDACIVPDHQSRHFLEACSEHHLLQGEGIVGKAFNATKLFFVPEVTTFSKTNYPLAHHAKISGLHAALAVPLKNKFNSSVEFVLEFFFPKACLDTEAQQDMLKSLSATLQQDFRSLNLFIDKELELEVVFPVREEVVFAENPLINAGTGEDMKPLPLEEISQEDSSWISHMIKANEKGKGVSLSWEYQKEEPKEEFMLTSGWDNNQIGSGHNNFLSEAEQFQKVTNSGLRIDMDPSFESASFGVGQTLLGSRRPGEKRRTKTEKTIGLEVLRQYFAGSLKDAAKSIGVCPTTLKRICRQHGITRWPSRKIKKVGHSLKKLQLVIDSVQGVQGSIQLDSFYTSFPELSSPHMSGTGTSFKNPNAQTENGVSAQGTAAAPKSPPSSSCSHSSGSSTCCSTGANQSTNTGTTSNTVTTLMAENASAILKRARSEVRLHTMNQDETKSLSRTLSHKTFSEHPLFENPPRLPENSSRKLKAGGASKVKATFGEAKVRFTLLPTWGFRELQHEIARRFNIDNIAPFDLKYLDDDKEWVLLTCEADLEECIDIYRSSQSRTIKISVHEASQVKLGGSFGSIGLGPSL

SEQ ID NO: 5 - protein, 808 aa, Arabidopsis thaliana
MENNSLPMDPAMDSSFMDGLLLEGCWLETTDASEFLNFSPSTSVAPFDPSSFMWSPTQDTSNSLSQMYGQDCPERSSLEDQNQGRDLSTFNRRWWIGPSGHHGFSVMERLVQAVTHIKDFTSERGSLIQLWVPVDRGGKRVLTTKEQPFSHDPMCQRLAHYREISENYQFSTEQEDSDSSSRDLVGLPGRVFLGKVPEWTPDVRFFKNEEYPRVQHAQDCDVRGTLAIPVFEQGSQICLGVIEVVMTTQMVKLSPDLESICRALQAVDLRSTEIPIPPSLKGPDFSYQAALPEIRNLLRCACETHKLPLAQTWVSCLKQSKTGCRHNDENYIHCVSTIDDACYVGDPTVREFHEACSEHHLLKGQGVVGEAFLTNGPCFSSDVSSYKKSEYPLSHHATMFGLHGTVAIRLRCIHTGSVDFVLEFFLPKNCRDIEEQRKMLNALSTIMAHVPRSLRTVTQKELEEEGDSMVSEVIEKGVTLPKIENTTEVHQSISTPQNVGLVFDGGTTEMGELGSEYGKGVSVNENNTFSSASGFNRVTEKKRTKAEKNITLDVLRQYFAGSLKDAAKSIGVCPTTLKRICRQHGIQRWPSRKIKKVGHSLQKIQRVIDSVEGVSGHHLPIGSFYASFPNLAASPEASSLQQQSKITTFLSYSHSPPAKSPGSSCSHSSSCSSETQVIKEDPTDKTRLVSRSFKETQTTHLSPSSQEDDFLRVKVSYEEEKIRFKMRNSHRLKDLLWEIAKRFSIEDVSRYDLKYLDEDNEWVLLRCDDDVEECVDVCRSFPGQTIKLLLQLSSSYLPERSSVSGCLS

SEQ ID NO: 6 - protein, 955 aa, Arachis duranensis
MRDGGVLSSGTMLEPTPPPPPPPLPPPPAPPPTTTTSISVDYDYINELFVDGCWLAASSSAAAAADGSADFYVPSPSFSNPIFDPFSWPCLDTEQIESQAREREQEHEKQEQPPPFSHDLVVAANSCSRNQQQQYHHYENQSVENNNPNPNNPSEFFRRWWIAPSSNPGPGSYVVEKLLKALMCIKDVNRNKDMLIQIWIPVMNRGGTQILRTNGLPFSLESRSVNLAKYREISEVYQFSAEEDSKELVPGLPGRVYKEKVPEWTPDVRFFRSYEYPRVDHAQVYDVRGSLALPIFEQGSKNCLGVVEVVMTQQKINYRPELESVCQALEAVNLTSSKLPTIQNVKHTSCEKSYETALPEIQEVLRSACEIHKLPLAQTWIPCIKQGKEGCRHSEDNYPHCISPVEHACYVGDPSIQVFHEACSEHHLLKGQGVAGGAFMTNQPCFAPDITLLSKTDYPLSHHARMFGLRAAVAIRLRSIYNSSDDFVLEFFLPLECIDNDEQKKMLTSLSLIIQRVCHSLRVISDKELEEETDFSVEEVIAHEDSGTFASAAAWPEPLQSQIVASLGAQEKSSETMGTSFSDQRQQQQESSVLKGNLDSNGECSTYNVGNLSSKTGDKKKSKVDKTITLQVLRQHFAGSLKDAAKNIGVCTTTLKRICRQHGIKRWPSRKIKKVGHSLQKLQLVIDSVQGASGAFQIDSFYSKFPDLAASPNLSGTSLFSNLKQCDNNPNSLSIQPDPGSLSPEGASKSPSSSCSQSSISSHPCSSMAEQQNHHLTNNNFDSSKDQMVLLVGENSSGDGLLKRIRSEAELKSLNEDRVKIVMPRSQSQETLGQHNVQNGHHGSLSRTKSKGTQKEDAAYRVKVTYGDEKARFKMPKNWGYEDLVQEVGRRFCISDMSKFDVKYLDDDYEWVLLTCDDDLEECIEVCQSSESTTIKLCLQLSNTNHSMRNPLEFR

SEQ ID NO: 7 - skipped

SEQ ID NO: 8 - protein, 914 aa, Arachis duranensis
MRDGGVLSSDGCWLAASSSAAAAADGSADFYVPSPSFSNPIFDPFSWPCLDTEQIESQAREREQEHEKQEQPPPFSHDLVVAANSCSRNQQQQYHHYENQSVENNNPNPNNPSEFFRRWWIAPSSNPGPGSYVVEKLLKALMCIKDVNRNKDMLIQIWIPVMNRGGTQILRTNGLPFSLESRSVNLAKYREISEVYQFSAEEDSKELVPGLPGRVYKEKVPEWTPDVRFFRSYEYPRVDHAQVYDVRGSLALPIFEQGSKNCLGVVEVVMTQQKINYRPELESVCQALEAVNLTSSKLPTIQNVKHTSCEKSYETALPEIQEVLRSACEIHKLPLAQTWIPCIKQGKEGCRHSEDNYPHCISPVEHACYVGDPSIQVFHEACSEHHLLKGQGVAGGAFMTNQPCFAPDITLLSKTDYPLSHHARMFGLRAAVAIRLRSIYNSSDDFVLEFFLPLECIDNDEQKKMLTSLSLIIQRVCHSLRVISDKELEEETDFSVEEVIAHEDSGTFASAAAWPEPLQSQIVASLGAQEKSSETMGTSFSDQRQQQQESSVLKGNLDSNGECSTYNVGNLSSKTGDKKKSKVDKTITLQVLRQHFAGSLKDAAKNIGVCTTTLKRICRQHGIKRWPSRKIKKVGHSLQKLQLVIDSVQGASGAFQIDSFYSKFPDLAASPNLSGTSLFSNLKQCDNNPNSLSIQPDPGSLSPEGASKSPSSSCSQSSISSHPCSSMAEQQNHHLTNNNFDSSKDQMVLLVGENSSGDGLLKRIRSEAELKSLNEDRVKIVMPRSQSQETLGQHNVQNGHHGSLSRTKSKGTQKEDAAYRVKVTYGDEKARFKMPKNWGYEDLVQEVGRRFCISDMSKFDVKYLDDDYEWVLLTCDDDLEECIEVCQSSESTTIKLCLQLSNTNHSMRNPLEFR

SEQ ID NO: 9 - protein, 964 aa, Arachis hypogaea
MRDGGVLSSGTMLEPTPPPPPPPPPPPPPAPPPSEVATTTTSISMDYDYINELFVDGCWLAASSSSAAAAAADGSADFYVPSPSFSNPIFDPFSWPCLDTEQIESQEREREQEHEHEKQQQPPPFSHDLVVAANSCSRNQQQQYHHYENQSVENNNPNPNNPSEFFRRWWIAPSSNPGPGSYVVEKLLKALMCIKDVNRNKDMLIQIWIPVMNRGGTQILRTNGLPFSLESRSVNLAKYREISEVYQFSAEEDSKELVPGLPGRVYKEKVPEWTPDVRFFRSYEYPRVDHAQVYDVRGSLALPIFEQGSKNCLGVVEVVMTQQKINYRPELESVCQALEAVNLTSSKLPTIQNVKHTSCEKSYETALPEIQEVLRSACEIHKLPLAQTWIPCIKQGKEGCRHSEDNYPHCISPVEHACYVGDPSIQVFHEACSEHHLLKGQGVAGGAFMTNQPCFAPDITLLSKTDYPLSHHARMFGLRAAVAIRLRSIYNSSDDFVLEFFLPLECIDNDEQKKMLTSLSLIIQRVCHSLRVISDKELEEETDFSVEEVIAHEDSGTFASAAAWPEPLQSQIVASLGAQEKSSETMGTSFSDQRQQQQESSVLKGNLDSNGECSTYNVGNLSSKTGDKKKSKVDKTITLQVLRQHFAGSLKDAAKNIGVCTTTLKRICRQHGIKRWPSRKIKKVGHSLQKLQLVIDSVQGASGAFQIDSFYSKFPDLAASPNLSGTSLFSNLKQCDNNPNSLSIQPDPGSLSPEGASKSPSSSCSQSSISSHPCSSMAEQQNHHLTNNNFDSSKDQMVLLVGENSSGDGLLKRIRSEAELKSLNEDRVKIVMPRSQSQETLGQHNVQNGHHGSLSRTKSKGTQKEDAAYRVKVTYGDEKARFKMPKNWGYEDLVQEVGRRFCISDMSKFDVKYLDDDYEWVLLTCDDDLEECIEVCQSSESTTIKLCLQLSNTNHSMRNPLEFR

SEQ ID NO: 10 - protein, 918 aa, Arachis hypogaea
MRDGGVLSSDGCWLAASSSSAAAAAADGSADFYVPSPSFSNPIFDPFSWPCLDTEQIESQEREREQEHEHEKQQQPPPFSHDLVVAANSCSRNQQQQYHHYENQSVENNNPNPNNPSEFFRRWWIAPSSNPGPGSYVVEKLLKALMCIKDVNRNKDMLIQIWIPVMNRGGTQILRTNGLPFSLESRSVNLAKYREISEVYQFSAEEDSKELVPGLPGRVYKEKVPEWTPDVRFFRSYEYPRVDHAQVYDVRGSLALPIFEQGSKNCLGVVEVVMTQQKINYRPELESVCQALEAVNLTSSKLPTIQNVKHTSCEKSYETALPEIQEVLRSACEIHKLPLAQTWIPCIKQGKEGCRHSEDNYPHCISPVEHACYVGDPSIQVFHEACSEHHLLKGQGVAGGAFMTNQPCFAPDITLLSKTDYPLSHHARMFGLRAAVAIRLRSIYNSSDDFVLEFFLPLECIDNDEQKKMLTSLSLIIQRVCHSLRVISDKELEEETDFSVEEVIAHEDSGTFASAAAWPEPLQSQIVASLGAQEKSSETMGTSFSDQRQQQQESSVLKGNLDSNGECSTYNVGNLSSKTGDKKKSKVDKTITLQVLRQHFAGSLKDAAKNIGVCTTTLKRICRQHGIKRWPSRKIKKVGHSLQKLQLVIDSVQGASGAFQIDSFYSKFPDLAASPNLSGTSLFSNLKQCDNNPNSLSIQPDPGSLSPEGASKSPSSSCSQSSISSHPCSSMAEQQNHHLTNNNFDSSKDQMVLLVGENSSGDGLLKRIRSEAELKSLNEDRVKIVMPRSQSQETLGQHNVQNGHHGSLSRTKSKGTQKEDAAYRVKVTYGDEKARFKMPKNWGYEDLVQEVGRRFCISDMSKFDVKYLDDDYEWVLLTCDDDLEECIEVCQSSESTTIKLCLQLSNTNHSMRNPLEFR

SEQ ID NO: 11 - protein, 958 aa, Arachis hypogaea
MRDGGVLSSGTMLEPTPPPPPPSPLPPPPPPPSEVATTTTTSILMDFDYINELFVDGCWLAASSSSAAAAADGSADFYVSSPSFSNPIFDPFSWPSLDTEQIESQEREQEHEQQQEQPPFSHDLVVAANNCSQNQQQQYHHYENQSVENNNPNPNNPSEFFRRWWIAPSSNPGPGSYVVEKLLKALMCIKDVNRNKDMLIQIWIPVINRGGTQILRTNGLPFSLESSSVNLAKYREISEVYQFSAEEDSKELVPGLPGRVYKEKVPEWTPDVRFFRSYEYPRVDHAQVYDVRGSLALPIFEQGSKNCLGVVEVVMTQQKINYRPELESVCQALEAVNLTSSKLPTIQNVKRTSCEKSYETALPEIQEVLRSACEIHKLPLAQTWIPCIKQGKEGCRHSEDNYPHCISPVEHACYVGDPSIQVFHEACSEHHLLKGQGVAGGAFMTNQPCFAPDITLLSKTDYPLSHHARMFGLRAAVAIRLRSIYNSSDDFVLEFFLPLECIDNDEQKKMLTSLSLIIQRVCHSLRVISDKEVEEETDFSAEVIAHEDSGTFASAAAWPEPLQSQIVASLGAQEKSSETMGTSFSDQRQQQQESSVLKGNLDSNGECSTYNVGNLSSKTGDKKKSKVDKTITLQVLRQHFAGSLKDAAKNIGVCTTTLKRICRQHGIKRWPSRKIKKVGHSLQKLQLVIDSVQGASGAFQIDSFYSKFPDLAASPNLSGTSLFSNLKQCDNNPNSLSIQPDPGSLSPEGASKSPSSSCSQSSISSHPCSSMAEQQNHHHTNNNFDSSKDQMVLLVGENSSGDGLLKRIRSEAELKSLNEDRAKVVMPRSQSQETLGQHNLKNGHHGSLSRTKSKGTQKEDAPYRVKVTYGDEKARFKMPKNWGYEDLVQEVGRRFCISDMNKFDLKYLDDDYEWVLLTCDDDLEECIEVCQSSESTTIKLCLQFSNTNHSMRNPLEFR

SEQ ID NO: 12 - protein, 912 aa, Arachis hypogaea
MRDGGVLSSDGCWLAASSSSAAAAADGSADFYVSSPSFSNPIFDPFSWPSLDTEQIESQEREQEHEQQQEQPPFSHDLVVAANNCSQNQQQQYHHYENQSVENNNPNPNNPSEFFRRWWIAPSSNPGPGSYVVEKLLKALMCIKDVNRNKDMLIQIWIPVINRGGTQILRTNGLPFSLESSSVNLAKYREISEVYQFSAEEDSKELVPGLPGRVYKEKVPEWTPDVRFFRSYEYPRVDHAQVYDVRGSLALPIFEQGSKNCLGVVEVVMTQQKINYRPELESVCQALEAVNLTSSKLPTIQNVKRTSCEKSYETALPEIQEVLRSACEIHKLPLAQTWIPCIKQGKEGCRHSEDNYPHCISPVEHACYVGDPSIQVFHEACSEHHLLKGQGVAGGAFMTNQPCFAPDITLLSKTDYPLSHHARMFGLRAAVAIRLRSIYNSSDDFVLEFFLPLECIDNDEQKKMLTSLSLIIQRVCHSLRVISDKEVEEETDFSAEVIAHEDSGTFASAAAWPEPLQSQIVASLGAQEKSSETMGTSFSDQRQQQQESSVLKGNLDSNGECSTYNVGNLSSKTGDKKKSKVDKTITLQVLRQHFAGSLKDAAKNIGVCTTTLKRICRQHGIKRWPSRKIKKVGHSLQKLQLVIDSVQGASGAFQIDSFYSKFPDLAASPNLSGTSLFSNLKQCDNNPNSLSIQPDPGSLSPEGASKSPSSSCSQSSISSHPCSSMAEQQNHHHTNNNFDSSKDQMVLLVGENSSGDGLLKRIRSEAELKSLNEDRAKVVMPRSQSQETLGQHNLKNGHHGSLSRTKSKGTQKEDAPYRVKVTYGDEKARFKMPKNWGYEDLVQEVGRRFCISDMNKFDLKYLDDDYEWVLLTCDDDLEECIEVCQSSESTTIKLCLQFSNTNHSMRNPLEFR

SEQ ID NO: 13 - protein, 862 aa, Arachis hypogaea
MEYGGIVHNENGAFGSLSESAVEAEVDLVDELLVEGCWVETTSAGGCYNWMHNPSDAVVAPQPQYLEMLQLQLQEESSSSSSDQESLVGKRWWIGPTRPGPSSSSSSSSSVKERLVVAVGYLKDYTKNNNLLIQIWVPPRRSPLPLPLPLPLDVLTFPNPSPNPNPNLCVRFLRSHEYSHHYQAQQHYDLRGSIALPVFERGTATCLGVLDILITNHLNLTNNYRPQLDNVCNALEAVDFRSSHQNLNANFMPPAIKVYEELYQAALNEIVEVLTSVCKTQNLPLGLTWAPCIQQGKCGCGHSSAMCVSTVDTACYVGDLEMLGFQEACSEYHLFKGQGIVGTAFTSAKPCFAIDITAFSRAEYPLSHLANIFGLHAAVAIPLRSLYTGSADFVLEFFLPKDCHDTEQQKHMLNSLSMLVQQACRSLHVATEDDFTPPMLTHHQAQAQIMEEACSKDQSWIAHMMEAQVQQKGKGVCVSLEYQMEEPKEEFKVTTNWDTANDQAHHQLFSSSDFGHIDVLEHSRSRASTAVDGGEESYALGGRRSSSSGSGGRKSGDKRRTKAEKTISLPVLRQYFAGSLKDAAKSIGVCPTTLKRICRQHGITRWPSRKIKKVGHSLKKLQLVIDSVQGAEGAIQIGSFYASFPELSSTDLSSRSESSPSKKTHSTTIPHQNHNNNTFLKSPPSSACSQTLDVVMTESSEAALLLKRAHSEAAELLQHASLQSQEDTKHNSFISSRSNNKSHHHHSQDRDKERGAFRVKATFGDEKIRFSMQPNWGFRDLQLEMARRFNLNDISISSSNIDLKYLDEDGEWVLLACDADLEECKDIHRSSQSRTIRLSLFQASPLNHLATNTFGNGTTSPS

SEQ ID NO: 14 - protein, 914 aa, Arachis ipaensis
MDFDYINELFVDGCWLAASSSSAAAAADGSADFYVSSPSFSNPIFDPFSWPSLDTEQIESQEREQEHEQQQEQPPFSHDLVVAANNCSQNQQQQYHHYENQSVENNNPNPNNPSEFFRRWWIAPSSNPGPGSYVVEKLLKALMCIKDVNRNKDMLIQIWIPVINRGGTQILRTNGLPFSLESSSVNLAKYREISEVYQFSAEEDSKELVPGLPGRVYKEKVPEWTPDVRFFRSYEYPRVDHAQVYDVRGSLALPIFEQGSKNCLGVVEVVMTQQKINYRPELESVCQALEAVNLTSSKLPTIQNVKRTSCEKSYETALPEIQEVLRSACEIHKLPLAQTWIPCIKQGKEGCRHSEDNYPHCISPVEHACYVGDPSIQVFHEACSEHHLLKGQGVAGGAFMTNQPCFAPDITLLSKTDYPLSHHARMFGLRAAVAIRLRSIYNSSDDFVLEFFLPLECIDNDEQKKMLTSLSLIIQRVCHSLRVISDKEVEEETDFSAEVIAHEDSGTFASAAAWPEPLQSQIVASLGAQEKSSETMGTSFSDQRQQQQESSVLKGNLDSNGECSTYNVGNLSSKTGDKKKSKVDKTITLQVLRQHFAGSLKDAAKNIGVCTTTLKRICRQHGIKRWPSRKIKKVGHSLQKLQLVIDSVQGASGAFQIDSFYSKFPDLAASPNLSGTSLFSNLKQCDNNPNSLSIQPDPGSLSPEGASKSPSSSCSQSSISSHPCSSMAEQQNHHHTNNNFDSSKDQMVLLVGENSSGDGLLKRIRSEAELKSLNEDRAKVVMPRSQSQETLGQHNLKNGHHGSLSRTKSKGTQKEDAPYRVKVTYGDEKARFKMPKNWGYEDLVQEVGRRFCISDMNKFDLKYLDDDYEWVLLTCDDDLEECIEVCQSSESTTIKLCLQFSNTNHSMRNPLEFR

SEQ ID NO: 15 - protein, 865 aa, Arachis ipaensis
MEYGGIVHNENGGFGSLSESAVEAEVDLVDELLVEGCWVETTSAGGCYNWMHNPSDAVVAPQPQYLEMLQLQLQEESSSSSSDQESLVGKRWWIGPTRPGPSSSSSSSSSSSVKERLVVAVGYLKDYTKNNNLLIQIWVPPRRSPLPLPLPLPLDVLAFPNPSPNPNPNLCVRFLRSHEYSHHYQAQQHYDLRGSIALPVFERGTATCLGVLDILITNHLNLTNNYRPQLDNVCNALEAVDFRSSHQNLNANFIPPAIKVYEELYQAALNEIVEVLTSVCKTQNLPLGLTWAPCIQQGKCGCGHSSAMCVSTVDTACYVGDLEMLGFQEACSEYHLFKGQGIVGTAFTSAKPCFAIDITAFSRAEYPLSHLANIFGLHAAVAIPLRSLYTGSADFVLEFFLPKDCHDTEQQKHMLNSLSMLVQQACRSLHVATDDDFTPPMLTHHQAQAQIMEEACSKDQSWIAHMMEAQVQQKGKGVCVSLEYQMEEPKEEFKVTTNWDTTNDQAHHQLFSSSDFGHIDVLEHSRSRASTAVDGGEESYALGGRRSSSSGSGGRKSGDKRRTKAEKTISLPVLRQYFAGSLKDAAKSIGVCPTTLKRICRQHGITRWPSRKIKKVGHSLKKLQLVIDSVQGAEGAIQIGSFYASFPELSSTDLSSRSESSPSKKTHTTNIPHHQNPNNNTFLKSPPSSACSQTLDVVMTESSEAALLLNRAHSEAAELLQHASLQSQEDTKHNSFISSRSNNKSHHHHSQDRDKERGAFRVKATFGDEKIRFSLQPNWGFRDLQLEMARRFNLNDISISSSNIDLKYLDEDGEWVLLACDADLEECKDIHRSSQSRTIRLSLFQASPLNHLATNTFGNGTTSPS

SEQ ID NO: 16 - protein, 582 aa, Cajanus cajan
MQIWVPERGGGGGGGGVGPGPDESVWGGYPMNMNMNMNMNMNMNMNMNMNMNMNMMNRSIRVGFLRWEEGVPYGYEEGPGWMGLPVLERGSGKCLGVLHIEYEYEGGVEGAVNEVVEVLTCVCKAQNLPLALTWAPCTQAKCGYGHSHSNYVSTVDRACFVGDAHLLPFHEVCSDHHLLRGQGIVGTAFTTAKPCFATDITAFTNDEYPLAHHASVLGLHAAVAIPLRSVSTDFVVELFLPKDCLLREHQNHLLNSLSLLLQQACRSLHVVTEDELSFPFPQVVEEQSWIANMMEAQAQKGKGVCVSLEYLELEEPMEEFKVTSNCNWDKTPSYVEEQQVFSDFIAQDSQTHTHTFSARRGRKSGEKRRTKAEKTISLPVLRQYFAGSLKDAAKSIGVCPTTLKRICRQHGITRWPSRKIKKVGHSLKKLQLVIDSVQGAEGSIQIGSFYSSFPELSSAAPCESKNKNINNSLHGHAESPVGVAVALRVKATFADEKIRFSLQQVWGFAELQVEIARRFNLNEMRSVVLKYLDDEGEWVVLACDADLEECKDLHTASHNRTIRLALFQASPPNTFPYPSPST

SEQ ID NO: 17 - protein, 691 aa, Cajanus cajan
MEYEGLVQNGAYGSLSEFFAPETDLIDELFVEGCWVETRVNSKSEWSMEAQIEESEVGKRWWIGPRANPGPSTSVQERLVVAVGYLKEYAMNSIQVWVPARTTRAQPPYALGLDYGDATRGFEFEDEWSPNPNIRFFRSDEQYDVRAGSLALPVFERGTAICLGFLQILMPNNPNLHNVCHALQGVDFINQNLNVPPGVTVKGFDELYEGALNEIVQVLTCVCKAHKLPLGLTWAPCIQQGKSGCGHLKELLGFQEACSQCHLLGQGQGQGVVGTAFTTTKPCFANDMSKALPLAHHANMFGLHAAVAIPLRSVSADFVLEFFLPRDCQDYKHILNSLSMLVQQACRSLHVVTVEEEFLLPVAHEMESSSWIAHMMEAQTQQNGKGVSVSLEYLQEPKQEFKVTTNGNCNENEESYGGRRGGRKSGDKRRTKAEKTISLPLLRQYFAGSLKDAAKSIGVCPTTLKRICRQHGITRWPSRKIKKVGHTLRKLQVVIDSVQGAQGAIQIGSFYTSFPELSSTTATASAVSQSSKNVNNNNDTSENNQGQLGATTFKSPTSSCNASIQLQAPHPIQCLEVPPLPQTSVWNTTTFRVKATFGDEKIRFSLQPNWVFRDLQMEIARRFNLNENINNIQLKYLDDAREWVLLTCDADLEECKDINRSSHNRTIRLFLFQASPLNHANAFGSGSPSYS

SEQ ID NO: 18 - protein, 862 aa, Cajanus cajan
MMEAPPPDGTTSMDFEYMGELFLDGCWLEASADGSEFLLQSPSFSNSLFDPSFSWPALETNHNESHDAAFGTQQESHNSMVNIVSGGGGGSGMQFQFDAHSVEGASEGVKRWWFAPTPSPGPGPSITEKLLRALTWFKDYNRNKDMLIQIWVPVHRGGRPILAANDLLFSLESRSVNLAKYREISVGYEFSTDEGESKELVPGLPGRVFRNKVPEWTPDVRFFKSDEYPRVDHAQEYDVSGTLAVPIFEQGSKMCLGVIEVVMTTQQINYGPELESVCKALEAVDLRSSKHSNIQIVKACNRSYDAALPEIQEVLRSACEMHNLPLAQTWIPCVQQGKEGCRHSDDNYLLCISPVEQACYVRDPSIRPFHEACTEHHLLKGEGVAGGAFMTNQPCFSTDITSLSKKDYPLSHHARLLGLRAAVAIRLRSIYNSTDDFVLEFFLPVDCNDSEEQRKMLTSLSIIIQRVCCSLRVISDKELEEANLSVDEVIGLADSGVSRTAICSGLQQKEKSSETMCRKFSDLRQQENPILKGNLDCVRECSTSVEGNFSGAGISRTVERRRAKAEKTITLQVLRQYFAGSLKDAAKNIGVCTTTLKRICRQHGIKRWPSRKIKKVGHSLQKLQLVIDSVQGASGAFQIDSFYSNFPDLASPNLSGTSLFSTLNQADNPNSVSTQPEPGALSPEGASKSPSSSCSQKLQHHTNNKDPAVGEDSADVVLKRIRSEAELKSLSRDGTKLLPRSQSQETLGEHPITQYHRPLLKTSSKVDAHRVKVTYGDEKTRFRMLKSWGYEDLLQEIARRFNVSDMRKFDVKYLDDDCEWVLLTCDADLEECIDVCQSSESSTIKLCLHASSHSMRSSLEFR

SEQ ID NO: 19 - protein, 886 aa, Cajanus cajan
MMGDGGVTSSGTMMEAPPPDGTTSMDFEYMGELFLDGCWLEASADGSEFLLQSPSFSNSLFDPSFSWPALETNHNESHDAAFGTQQESHNSMVNIVSGGGGGSGMQFQFDAHSVEGASEGVKRWWFAPTPSPGPGPSITEKLLRALTWFKDYNRNKDMLIQIWVPVHRGGRPILAANDLLFSLESRSVNLAKYREISVGYEFSTDEGESKELVPGLPGRVFRNKVPEWTPDVRFFKSDEYPRVDHAQEYDVSGTLAVPIFEQGSKMCLGVIEVVMTTQQINYGPELESVCKALEAVDLRSSKHSNIQIVKACNRSYDAALPEIQEVLRSACEMHNLPLAQTWIPCVQQGKEGCRHSDDNYLLCISPVEQACYVRDPSIRPFHEACTEHHLLKGEGVAGGAFMTNQPCFSTDITSLSKKDYPLSHHARLLGLRAAVAIRLRSIYNSTDDFVLEFFLPVDCNDSEEQRKMLTSLSIIIQRVCCSLRVISDKELEEANLSVDEVIGLADSGVSRTAICSGLQQKEKSSETMCRKFSDLRQQENPILKGNLDCVRECSTSVEGNFSGAGISRTVERRRAKAEKTITLQVLRQYFAGSLKDAAKNIGVCTTTLKRICRQHGIKRWPSRKIKKVGHSLQKLQLVIDSVQGASGAFQIDSFYSNFPDLASPNLSGTSLFSTLNQADNPNSVSTQPEPGALSPEGASKSPSSSCSQSSISSHSCSSMSELQHHTNNKDPAVGEDSADVVLKRIRSEAELKSLSRDGTKLLPRSQSQETLGEHPITQYHRPLLKTSSKVDAHRVKVTYGDEKTRFRMLKSWGYEDLLQEIARRFNVSDMRKFDVKYLDDDCEWVLLTCDADLEECIDVCQSSESSTIKLCLHASSHSMRSSLEFR

SEQ ID NO: 20 - protein, 664 aa, Cajanus cajan
MEAQIEESEVGKRWWIGPRANPGPSTSVQERLVVAVGYLKEYAMNSIQVWVPARTTRAQPPYALGLDYGDATRGFEFEDEWSPNPNIRFFRSDEQYDVRAGSLALPVFERGTAICLGFLQILMPNNPNLHNVCHALQGVDFINQNLNVPPGVTVKGFDELYEGALNEIVQVLTCVCKAHKLPLGLTWAPCIQQGKSGCGHLKGEHYENYVSLVDGASFVADVELLGFQEACSQCHLLGQGQGQGVVGTAFTTTKPCFANDMSKALPLAHHANMFGLHAAVAIPLRSVSADFVLEFFLPRDCQDYKHILNSLSMLVQQACRSLHVVTVEEEFLLPVAHEMESSSWIAHMMEAQTQQNGKGVSVSLEYLQEPKQEFKVTTNGNCNENEESYGGRRGGRKSGDKRRTKAEKTISLPLLRQYFAGSLKDAAKSIGVCPTTLKRICRQHGITRWPSRKIKKVGHTLRKLQVVIDSVQGAQGAIQIGSFYTSFPELSSTTATASAVSQSSKNVNNNNDTSENNQGQLGATTFKSPTSSCNASIQLQAPHPIQCLEVPPLPQTSVWNTTTFRVKATFGDEKIRFSLQPNWVFRDLQMEIARRFNLNENINNIQLKYLDDAREWVLLTCDADLEECKDINRSSHNRTIRLFLFQASPLNHANAFGSGSPSYS

SEQ ID NO: 21 - protein, 646 aa, Cajanus cajan
MGYDAYAFGEVGEEDMIEELLVEGCWVERSGKRWWINPNPGSVKERVVVAVGYLREYRKNGNEVMQIWVPERGGGGGGGGVGPGPDESVWGGYPMNMNMNMNMNMNMNMNMNMNMNMNMMNRSIRVGFLRWEEGVPYGYEEGPGWMGLPVLERGSGKCLGVLHIEYEYEGGVEGAVNEVVEVLTCVCKAQNLPLALTWAPCTQAKCGYGHSHSNYVSTVDRACFVGDAHLLPFHEVCSDHHLLRGQGIVGTAFTTAKPCFATDITAFTNDEYPLAHHASVLGLHAAVAIPLRSVSTDFVVELFLPKDCLLREHQNHLLNSLSLLLQQACRSLHVVTEDELSFPFPQVVEEQSWIANMMEAQAQKGKGVCVSLEYLELEEPMEEFKVTSNCNWDKTPSYVEEQQVFSDFIAQDSQTHTHTFSARRGRKSGEKRRTKAEKTISLPVLRQYFAGSLKDAAKSIGVCPTTLKRICRQHGITRWPSRKIKKVGHSLKKLQLVIDSVQGAEGSIQIGSFYSSFPELSSAAPCESKNKNINNSLHGHAESPVGVAVALRVKATFADEKIRFSLQQVWGFAELQVEIARRFNLNEMRSVVLKYLDDEGEWVVLACDADLEECKDLHTASHNRTIRLALFQASPPNTFPYPSPST

SEQ ID NO: 22 - skipped

SEQ ID NO: 23 - protein, 924 aa, Cannabis sativa
MEVGGFCKSYTMEEGVLSPSTILGAPSEYPMDLDFMDELFLEGCWLETRDGSEYISQTSSSNPLFDPLFWPTLETNGDLNANPSQRSNQEGRQKSIFNESVGVSVLRALPPSQTINNAPNNPGVSEGLITENDEMRRKNWIGTKESQGPSSFVMEKLCRALMYIKDVIRDKDILVQIWIPVDKEGRRVLTTRDLPFALDDSCPKLARYRDISVKYQFPAEEDSKGLIMGLPGRVFSGKVPEWTPDVRYFRNDEYPRLMHAYQYDVRGTLALPIFEQGSRICLGVVEVIMTTQKIKYRPELESVCKALEAVNLKSSEVLSTHNVFNKYYQAALPEIQQVLKSACDTHRLPLAQTWVPCIYQAKEGCRHSDENYVQCVSTVDHACYVADPHIQGFHEACSEHHLLRGQGVVGGAFMTNQPCFSADITLYPKTEYPLSHHAMLFELHAAVAIRLRSIHTGAADFVLEFFLPKDCTDPEEQKKMLTSLSLIIQQCCQSLRVVTEKELEEEGDFQANKVLTPSIDRPDTEICFQEVQQNETDLSLFTVEKTSDGRHSKSSQNQRGSSLKPSDEYVEECSTVGEGSFSNLGGVKTGERRRTKAEKTITLQVLRQYFAGSLKDAAKSIGVCSTTLKRICRQHGIKRWPSRKIKKVGHSLQKLQLVIDSVQGASGAFQIDSFYSNFPELASPNVSGTSPFSTSKANDHPTPSCLQQPGEGSGGMYSAQATTAAAAATSKSSSTYSQSSSSSQCCSSRSQQHPQTWNNMVTSSEDANGGENSGDDVVLKRVRSEAELFASHEVDNNNLLPRSQSHISLMEHRKSLKSGFPPSSVKNERRLTQQEGELQRVKVTYGEEKTRFRIHNNWGFTDLQQEVGRRFGIQDMTTFTIKYLDDDSEWVLLTCDADLEECFEVWPASQNSTIKLSLQLSRVS

SEQ ID NO: 24 - protein, 936 aa, Casuarina glauca
MEIERKLNMDYGAFASNSTTYGNLTDTAMEMDFMDELLFEGCWLETTSGSNHLPSGPLTSRALNDPSHYLPLLDSNSSGHLNISHHQQIFQEETEGTFPESEGILVEGTELGRRLWIAPRANPSPSTSVKERLMLAIGYLRECTKNMNVLIQIWVPIRRGGSYFLTTQDQPYYFGANCKNLANYRNVSKAYQFAVEEDMEESAGLPGRVFLGKLPEWTPDVRFFKKDEYPRINYAQQYDVRGSLALPVFERGSGTCLGVVEIVTNTQKINYRPELENVCQALESVDLRSSQLLSPPGVKACDELYQAALAEIIEVLATVCKAHRLPLALTWAPCYQQGKGGCRHSDENYALCVSTVDAACFVADLDVLGFHEACSEYHLFRGQGTVGTAFTTSKPCFATDITAFSKTEYPLSHHARMFGLRAAVAIPLRSIYTGSSEFVLEFFLPKDCQDPEEQRQMLNSLSIVLQQACRSLHAVMDKEPEEQEVIYPVKEIAIASDVRINKEEPQKSGSPPMREASTKESSWIAHMMEAQQKGKGVSISLEYQEEEPKEEFKVTTHWDNTLGGSCHGQAFSDFGQLQQSSGSKGSVEGGGDSYSYGSRRSSGGRRAGEKRRTKTEKTISLPVLRQYFAGSLKDAAKSIGVCPTTLKRICRQHGITRWPSRKIKKVGHSLRKLQLVIDSVQGAEGAIQIGSFYSNFPELSSSGNSSFSSLKMNENSKQSNAIPETSGLFIQGSSTLSKSPPSSCSQNSGPSIFCPSGAKQQNTTVNTLSTGETLMRENPVGVLQMMGCTEVNLHAMSQQDLSLLQGVESFKSFGSHPGLETLPILPESSSHNSQYGGALRVKATFGDEKIRFSWQQNWTFGDLQLEIARRFNLDDINRVDLKFMDDDGEWVLLTCDADFQECIDIHRASESHTVRLCVQHASNPCLGSPFGNTSLS

SEQ ID NO: 25 - protein, 967 aa, Cicer arietinum
MEYGGGLVEDCGGFGTMVGGETDMIEELLVEGCWVEASENNLMMMHHDDHMSSSTTPQPHYIPMGDNDEESGNFVVGKRWWIGPQANPGPSTSVKERLVLAVGYLKEYTKNSNSNSTSNSNSNSNSNSNVLIQIWVPLRRRSGLFHNQYHNPNPVHESLPISVPNSNVQVRFFRSHEYPRVQAHHGSLLALPVFERGTATCLGVIEFLIANQNLINYRPQLDHLSNALEAVDFTSNQNMIPPAVKVFEELYEAAVNEIVQVLASVCKTHNLPLALTWAPCIQQEGGGRGKGGCSNSNGNSNSNSNGSNNNMMMSCVSTVDSACYIGDVDVLGFQEACSEYHLYNGQGIVGTAFTTTKPCFAIDITAFSKAEYPLAHHANMFGLHAAVAIPLRSVYTGSAADFVLEFFLPKDCLDTHQQKHMLNSLSLVVQQACRSLHLHVVMEDDHHNHNHHHLHHQHQHQHQHEEDQFTFPTTNIYMPSVDAAAAAPVVVLSQVEADASASASACSTKETTSSSCSWIAHMMEAQHKGKGVSVSLEYLQEPKEEFKVTTCNWEREREGNSVFSEFGQVLQQQQHEHQSMSNSRASTVVSVEGGEESGGGGGSGGGGRRSSCSSNGRKSGDKRRTKAEKTISLPVLRQYFAGSLKDAAKSIGVCPTTLKRICRQHGITRWPSRKIKKVGHSLKKLQLVIDSVQGAEGAIQIGSFYASFPELSSATGHSDQSSMKLMHNHGVSDHHNSFYGDGGVTTSNLKSPSSACSQTVGNQTNSTLINNNVVLMTESNALASTDHAHAHAHAAALMQIRRTHSEAELLHHHTSNIDIQDYQLHDQDTKQLLLHFNKSQTLPPRPSTTTTTNGYNNSLERGAFRVKATFADEKIRFSLQGMWCFRDLQVEIARRFNLNDMNNLVVKYLDDEGEWVVLACDGDLEECKDLHTSSHTRTIRLSLFQASPLNLHPNTFRNTSSSPPSSS

SEQ ID NO: 26 - protein, 904 aa, Cicer arietinum
MEDGALTSSTTMMEAPQPDENSMDFDYVSELLLDGCWLEASADGSDFLLQSSPFSNPLFDPSFTWPSLDNIDPPDNVDRHKSQDASLGTEQESRSIVNVDGGSNQKEYRFETYSGEGFFSRWWIGPTPNSGPGGSFIVEKLIRALKWIKDFDRNKDMLIQIWVPVNRGDDRPFLTANDLPFSLETRSLNLARYREISVRYQFSAEEEDSKDLVAGLPGRVYRDKVPEWTPDVRFFRSDEYPRVDHAQECDIHGTLAVPVFEQGSRTCLGVIEVVMTTQQSNYSAELETVCKALEVVDLRSSRHSSLQNVKARDRSYETALPEIQEVLRSACEMHKLPLAQTWIPCIQQGKDGCRHSDDNYVHCISPVEYACYIGDSSVRFFHEACMEHHLLKGQGVAGGAFMTNQPCFSADITSLSKIDYPLSHHARLFGLRAAVAIRLRSIYSTSDDYVLEFFLPVDCNDSGEQKKMLTSLSMIIQRVCRNLRVITNKELEKNNLSANEVMDLADSGFASGATWSELQHRRMAASLDGDFFFNETMGGKFSEQTQQQENLILKGDTESGRECSLSVEGNLLSSVGIREKRRPKADKTITLQVLRQYFAGSLKDAAKNIGVCTTTLKRICRQHGIKRWPSRKIKKVGHSLQKLQLVIDSVQGASSTFQIDSFYSKLSDLASPNLSGTSLISTLNQIDNQVSLNTQPDPDSLSPEDASKSPSTSCSQSSFSSHSCSSMSEQQHHTNNFASNKDPLVGEDSVDVVLKRIRSEAELKSLIQDNNKANVMPRSQSHETLGEHPITEYHQSLLKTDRKASQKEDAHRVKVTYGDEKSRFRMPKTWCYEDVVQEIGRRFNVSDMSKFDIKYLDDDCEWVLLTCDADLEECIDVCQSSEISTIKLCLQPSSNFIRSSLEFR

SEQ ID NO: 27 - protein, 945 aa, Citrus clementina
MDDGNFTPNPSFGDFPGTAMDLDFMDELLFDGCWLETTDALDFLQPGPSSSGPADDTSQYLPYSEGTTGHLSMNVNPQQQVYQEETKNKFTENPSLVYPKIEEIQDTRTQDHQGFDPATSSGQSGSFLAQGNELGRRWWIGPRENTGHSSSVKDRLMQAIIYLKDYIKDGKALVQIWVPINSGGKQLLTTDDQPYSLDPNSKSLESYRNVSTTYHFAADEDSKEFVGLPGRVFREQSPEWTPDVLFFRSEEYPRVNHAQQYDVHGSLALPVFERGSGACLGVVEVVTTSRKINYRLDLENVCKALEAVDLRSSGNFSTSCVKARNELYHAAMPEIAEVLRSVCKTHKLPLALTWAPCVQGRKVECQQSDENFPHCFLTVDSACFVANENLSGFFVACSEQQLLQGQGIVGKAFSLSKQCFTADITAFSKSNYPLSHLARMFGLRAAVAIPLRSITTGVVEFILEFFLPRECQDIEEQKQMVKSLSVAMQQVCQSLRLAMEKELEVVILPVGEMAVTSDGSSPSKETSQEQSSWISHMIEAQQKGKGVSVSWDHQEEPKEEFKMTTHWDDARAESFHKEVFPGFGQFQHNSGAKSSVEGGGDSSSLGGHLSVGSRKAGEKRRTKTEKTISLQVLRQYFAGSLKDAAKSIGVCPTTLKRICRQHGITRWPSRKIKKVGHSLRKLQLVIDSVQGAEGAIQIGSFYTTFPDLNSPNFSGSGTFSSMKINDHPEPSNAPPANGLFSTGAAVSKSPSSSCSQSSGSSNCCSTGAKLNTTNINALSSVDTKMVEDPGGMLKRARSDAELHALNQEEPKLLARSRSHKILGEHVSLESLPPLPKCGNHNLRDGSTFRVKASFGEEKIRFSLQPNWGFKDLQQEIARRFNIEDFNEIDLKYLDDDHEWVLLTCDADLEECIDIYKSSQSHTIKISLHRASHLKLVKVAHNNAPS

SEQ ID NO: 28 - protein, 936 aa, Citrus clementina
MEDTVFLPGTMRGASLDSAMDLDYMNELLAEGCWLETIDGSEFPHPSPSTSTALFDSSFVWPASEITNGDTGRNPSQQGKQDDMQQSFFLQTSSMNDPQQNGPLSTPSLSQGMVNVDEDDGQLDDNIAEGSELSKRRWIGPRANLGPATSVIQRLGWAVGYIKDFSINKDVLIQLWVPVIRAGRQVLTTYDQPFSLDLKCQRLANYRAISIKYYFSAEEDSKDVAGLPGRVFLGKAPEWTPDVQFFRSDEYPRVDHAQQYDVRGTLAVPVFEQGSRTCLGVIEVVMMTQKLKYRSELESVCKALEAVDLRSSEVPSTKNMKAWNTSYQAALPEIREVLRCACETHRLPLAQTWVSCIQQGKVGCWHSDKNNNHCVSTVDDACYIADPDMWGFQEACSEHHLLKGQRVAGEAFLTNQPCFSNDITSLKKTEYPLSHHARMFGLCGAVAIRLRSILTGNSDFVLEFFLPKGCRDPEEQKKMLSSLSIVIQQVSRSLRVVTDKEMEEETSLPVSEVIFPSDGRPSREKILKVDSHSEKYSHDNSFQSACLTKVQRDCDVSLNQNGKPRKVSGKRFLEGGHRKEDFSLKGSAEYCDDSNSVEGSFSSVALGKTGEKRRTKVDKTITLQVLQQYFSGSLKDAAKSIGVCPTTLKRICRQHGIKRWPSRKIKKVGHSLQKLQLVIDSVQGASGSFQIGSFYTNFPELASPNLSRSGASPFSNSLPTDQQKLTGMQAKGGTLSPQAQAAKSPSSSCSQSSNSSQCCTSGTQQHRSTNNIAGSEDPVVGESFDDVVLKRVRSYEELHASSQEPRLLPRSQSYKSFREQPIPRLPENGCRMSQEVVDGRRVKVTYGEEKIRLRMQDNWKFQDLLQEIARRFNIDDMSLFDVKYLDDDSDWVLLTCDADLEECIEVCRSSEGQTIKLLLQVSHHLFERRSGSSGNS

SEQ ID NO: 29 - protein, 721 aa, Citrus sinensis
MDDGNFTPNPSFGAFPGTAMDLDFMDELLFDGCWLETTDALDFLQPGPSSSGPADDTSQYLPYSEGTTGHLSMNLNPQQQVYQEETKNKFTENPSLVYPKIEEIQDTRTQDHQGFDPATSSGQSGSFLAQGNELGRRWWIGPRENTGHSSSVKDRLMQAIIYLKDYIKDGKALVQIWVPINSGGKQLLTTDDQPYSLDPNSKSLESYRNVSTTYHFAADEDSKEFVGLPGRVFREQSPEWTPDVLFFRSEEYPRVNHAQQYDVHGSLALPVFERGSGACLGVVEVVTTSRKINYRLDLENVCKALEAVDLRSSGNFSTSCVKARNELYHAAMPEIAEVLRSVCKTHKLPLALTWAPCVQGRKVECQQSDENFPHCFLTVDSACFVANENLSGFFVACSEQQLLQGQGIVGKAFSLSKQCFTADITAFSKSNYPLSHLARMFGLRAAVAIPLRSITTGVVEFILEFFLPRECQDIEEQKQMVKSLSVAMQQVCQSLRLAMEKELEVVILPVGEMAVTSDGSSPSKETSQEQSSWISHMIEAQQKGKGVSVSWDHQEEPKEEFKMTTHWDDARAESFHKEVFPGFGQFQHNSGAKSSVEGGGDSSSLGGHLSVGSRKAGEKRRTKTEKTISLQVLRQYFAGSLKDAAKSIGVCPTTLKRICRQHGITRWPSRKIKKVGHSLRKLQLVIDSVQGAEGAIQIGSFYTTFPDLNSPIFLGVVLFHQ

SEQ ID NO: 30 - protein, 936 aa, Citrus sinensis
MEDTVFLPGTMRGASLDSAMDLDYMNELLAEGCWLETIDGSEFPHPSPSTSTALFDSSFVWPASEITNGDTGRNPSQQGKQDDMQQSFFLQTSSMNDPQQNGPLSTPSLSQGMVNVDEDDGQLDDNIAEGSELSKRRWIGPRANLGPATSVIQRLGWAVGYIKDFSINKDVLIQLWVPVIRAGRQVLTTYDQPFSLDLKCQRLANYRAISIKYYFSAEEDSKDVAGLPGRVFLGKAPEWTPDVQFFRSDEYPRVDHAQQYDVRGTLAVPVFEQGSRTCLGVIEVVMMTQKLKYRSELESVCKALEAVDLRSSEVPSTKNMKAWNTSYQAALPEIREVLRCACETHRLPLAQTWVSCIQQGKVGCWHSDKNNNHCVSTVDDACYIADPDMWGFQEACSEHHLLKGQRVAGEAFLTNQPCFSNDITSLKKTEYPLSHHARMFGLCGAVAIRLRSILTGNSDFVLEFFLPKGCRDPEEQKKMLSSLSIVIQQVSRSLRVVTDKEMEEETSLPVSEVIFPSDGRPSREKILKVDSHSEKYSHDNSFQSACLTKVQRDCDVSLNQNGKPRKVSGKRFLEGGHRKEDFSLKGSAEYCDDSNSVEGSFSSVALGKTGEKRRTKVDKTITLQVLQQYFSGSLKDAAKSIGVCPTTLKRICRQHGIKRWPSRKIKKVGHSLQKLQLVIDSVQGASGSFQIGSFYTNFPELASPNLSRSGASPFSNSLPTDQQKLTGMQAKGGTLSPQAQAAKSPSSSCSQSSNSSQCCTSGTQQHRSTNNIAGSEDPVVGESFDDVVLKRVRSYEELHASSQEPRLLPRSQSYKSFREQPIPRLPENGCRMSQEVVDGRRVKVTYGEETIRLRMQDNWKFQDLLQEIARRFNIDDMSLFDVKYLDDDSDWVLLTCDADLEECIEVCRSSEGQTIKLLLQVSHHLFERRSGSSGNS

SEQ ID NO: 31 - protein, 945 aa, Citrus sinensis
MDDGNFTPNPSFGAFPGTAMDLDFMDELLFDGCWLETTDALDFLQPGPSSSGPADDTSRYLPYSEGTTGHLSMNLNPQQQVYQEETKNKFTENPSLVYPKIEEIQDTRTQDHQGFDPATSSGQSGSFLAQGNELGRRWWIGPRENTGHSSSVKDRLMQAIIYLKDYIKDGKALVQIWVPINSGGKQLLTTDDQPYSLDPNSKSLESYRNVSTTYHFAADEDSKEFVGLPGRVFREQSPEWTPDVLFFRSEEYPRVNHAQQYDVHGSLALPVFERGSGACLGVVEVVTTSRKINYRLDLENVCKALEAVDLRSSGNFSTSCVKARNELYHAAMPEIAEVLRSVCKTHKLPLALTWAPCVQGRKVECQQSDENFPHCFLTVDSACFVANENLSGFFVACSEQQLLQGQGIVGKAFSLSKQCFTADITAFSKSNYPLSHLARMFGLRAAVAIPLRSITTGVVEFILEFFLPRECQDIEEQKQMVKSLSVAMQQVCQSLRLAMEKELEVVILPVGEMAVTSDGSSPSKETSQEQSSWISHMIEAQQKGKGVSVSWDHQEEPKEEFKMTTHWDDARAESFHKEVFPGFGQFQHNSGAKSSVEGGGDSSSLGGHLSVGSRKAGEKRRTKTEKTISLQVLRQYFAGSLKDAAKSIGVCPTTLKRICRQHGITRWPSRKIKKVGHSLRKLQLVIDSVQGAEGAIQIGSFYTTFPDLNSPIFSGSGTFSSMKINDHPEPSNAPPANGLFSTGAAVSKSPSSSCSQSSGSSNCCSTGAKLNTTNINALSSVDTKMVEDPGGMLKRARSDAELHALNQEEPKLLARSRSHKILGEHVSLESLPPLPKCGNHNLRDGSTFRVKASFGEEKIRFSLQPNWGFKDLQQEIARRFNIEDFNEIDLKYLDDDHEWVLLTCDADLEECIDIYKSSQSHTIKISLHRASHLKLVKVAHNNAPS

SEQ ID NO: 32 - protein, 945 aa, Citrus trifoliata
MDDGNFTPNPSFGALPGTAMDLDFMDELLFDGCWLETTDALDFLQSGPSSSGPADDTSRYLPYSEGTTGHLSMNLNPQQQVYQEETKNKFTENPSLVYPKIEEIQDTRTQDRQGFDPATSSGQSGGFLAQGNELGRSWWIGPTENTGHSSSVKDRLMQAIIYLKDYIKDGKALVQIWVPINSGGKQLLTTDDQPYSLDPNSKSLESYRNVSTTYHFAADEDSKEFVGLPGRVFREQSPEWTPDVLFFRSEEYPRVNHAQQYDVHGSLALPVFERGSGACLGVVEVVTTSRKMNYRLDLENVCKALEAVDLRSSENFSTSCVKARNELYHAAMPEIAEVLRSVCKTHKLPLALTWAPCVQGRKVECQQSDENFPHCFLTVDSACFVANENLLGFFVACSEQQLLQGQGIVGKAFSLSKQCFTADITAFSKSNYPLSHLARMFGLRAAVAIPLRSITTGVVEFILEFFLPRECQDIEEQKQMVKSLSVAMQQVCQSLRLAMEKELEVVVLPVGEMAVTSDGSSPSKETLQEQSSWISHMIEAQQKGKGVSVSWDHQEEPKEEFKMTTDWDDARAESFHKQVFPGFGQFQHNSGAKSSVEGGGDSSSLAGHLSVGSRKAGEKRRTKTEKTISLQVLRQYFAGSLKDAAKSIGVCPTTLKRICRQHGITRWPSRKIKKVGHSLRKLQLVIDSVQGAEGAIQIGSFYTTFPDLNSPNFSGSGTFSSMKINDPPEPSNAPPANGLFSTGAAVSKSPSSSCSQSSGSSNCCSTGAKLNTTSINALSSVDTKMVEDPGGMLKRARSDAELHALNQEEPKLLARSLSHKILGEHVSLESLPPLPKYGNHNLRDGSTFRVKATFGEEKIRFSLQTNWGFKDLQQEIARRFNIEDFNKIDLKYLDDDNEWVLLTCDADLEECIDIYKSSQSHTIKISLHRASHLKLVKVAHNNAPS

SEQ ID NO: 33 - protein, 934 aa, Citrus trifoliata
MEDTVFLPSTMHGASLDSAMDLDYMNELLAEGCWLETIDGSEFPHPSPSTSTALFDSSFLWPASEITNGDTSRNPSQQGNQDDMQQSFFLQTSSMNDPQQKGPLSTPSLSQGMVNVDEDDGQLDDNITEGSELSKRRWIGPRANPGPATSVIQRLGWALGYIKDFSINKDVLIQLWVPVIRAGRQVLTTYDQPFSLDLKCQRLANYRDISIKYYFSAEEDSKDVAGLPGRVFLGKAPEWTPDVQFFRSDEYPRVDHAQQYDVRGTLAVPVFEQGSRTCLGVIEVVMTTQKLKYRSELESVCKALEAVDLRSSEVPSTKNMKAWNTSYQAALPEIREVFRCACETHRLPLAQTWVSCIQQGKVGCWHSDKNNNHCVSTVDDACYVADPDMWGFREACSEHHLLKGQRVAGEAFLTNQPCFSNDITSLKKTEYPLSHHARMFGLCGAVAIRLRSILTGNSDFVLEFFLPKGCRDPEEQKKMLSSLSIVIQQVSRSLRVVTDKEMEEETSLPVSEVIFPSDGRPSREKILKVDSHSEKYSHDNSSQSACLTKVQRDCNVSLSQNGKPRKVLGKRILEGGHRKEDFSMKGTAEYFDDSNSVEGSFSSVALGKTGEKRRTKVDKTITLQVLQQYFAGRLKDAAKSIGVCPTTLKRICRQHGIKRWPSRKIKKVGHSLQKLQLVIDSVQGASGSFQIGSFYTNFPELASPNLSRSGASPFSNSLPTDQQKLTGMQAKGGTLSPQAAKSPSSSCSQSSNSSQCCTSWTQQHCSINNIAGSEDPVVGESFDDVVLKRVRSYEELHASSQEPRLLLRSQSYKSFREQPIPRLPENGCRMSQEVVDGRRVKVTYGEEKIRLRMQDNWKFQDLLQEIARRFNIDDMSLFDVKYLDDDSDWVLLTCDADLEECIDVCRSSEGQTIKLLLQVSHHLLERRSGSSGNS

SEQ ID NO: 34 - protein, 945 aa, Citrus unshiu
MDDGNFTPNPSFGAFPGTAMDLDFMDELLFDGCWLETTDALDFLQPGPSSSGPADDTSRYLPYSEGTTGHLSMNLNPQQQVYQEETKNKFTENPSLVYPKIEEIQDTRTQDHQGFDPATSSGQSGSFLAQGNELGRRWWIGPRENTGHSSSVKDRLMQAIIYLKDYIKDGKALVQIWVPINSGGKQLLTTDDQPYSLDPNSKSLESYRNVSTTYHFAADEDSKEFVGLPGRVFREQSPEWTPDVLFFRSEEYPRVNHAQQYDVHGSLALPVFERGSGACLGVVEVVTTSRKINYRLDLENVCKALEAVDLRSSGNFSTSCVKARNELYHAAMPEIAEVLRSVCKTHKLPLALTWAPCVQGRKVECQQSDENFPHCFLTVDSACFVANENLSGFFVACSEQQLLQGQGIVGKAFSLSKQCFTADITAFSKSNYPLSHLARMFGLRAAVAIPLRSITTGVVEFILEFFLPRECQDIEEQKQMVKSLSVAMQQVCQSLRLAMEKELEVVILPVGEMAVTSDGSSPSKETSQEQSSWISHMIEAQQKGKGVSVSWDHQEEPKEEFKMTTHWDDARAESFHKQVFPGFGQFQHNSGAKSSVEGGGDSSSLGGHLSVGSRKAGEKRRTKTEKTISLQVLRQYFAGSLKDAAKSIGVCPTTLKRICRQHGITRWPSRKIKKVGHSLRKLQLVIDSVQGAEGAIQIGSFYTTFPDLNSPIFSGSGTFSSMKINDHPEPSNAPPANGLFSTGAAVSKSPSSSCSQSSGSSNCCSTGAKLNTTNINALSSVDTKMVEDPGGMLKRARSDAELHALNQEEPKLLARSRSHKILGEHVSLESLPPLPKCGNHNLRDGSTFRVKASFGEEKIRFSLQPNWGFKDLQQEIARRFNIEDFNEIDLKYLDDDHEWVLLTCDADLEECIDIYKSSQSHTIKISLHRASHLKLVKVAHNNAPS

SEQ ID NO: 35 - protein, 920 aa, Citrus unshiu
MEDTVFLPGTMRGASLDSAMDLDYMNELLAEGCWLETIDGSEFPHPSPSTSTALFDSSFVWPASEITNGDTSRNPSQQGNQDDMQQSFFLQTSSMNDPQQNGPLSTPSLSQGMVNVDEDDGQLDDNITEGSELSKRRWIGPRANPGPATSIIQRLGWAVGYIKDFSINKDVLIQLWVPVIRAGRQVLTTYDQPFSLDLKCQRLANYRAISIKYYFSAEEDSKDVAGLPGRVFLGKAPEWTPDVQFFRSDEYPRVDHAQQYDVRGTLAVPVFEQGSRTCLGVIEVVMMTQKLKYRSELESVCKALEAWNTSYQAALPEIREVLRCACETHRLPLAQTWVSCIQQGKVGCWHSDKNNNHCVSTVDDACYIADPDMWGFQEACSEHHLLKGQRVAGEAFLTNQPCFSNDITSLKKTEYPLSHHARMFGLCGAVAIRLRSILTGNSDFVLEFFLPKGCRDPEEQKKMLSSLSIIIQQVSRSLRVVTDKEMEEETSLPVSEVIFPSDGRPSREKILKVDSHSEKYSHDNSSQSACLTKVQRDCDVSLNQNGKPRKVSGKRFLEGGHRKEDFSLKGSAEYCDDSNSVEGSFSSVALGKTGEKRRTKVDKTITLQVLQQYFSGSLKDAAKSIGVCPTTLKRICRQHGIKRWPSRKIKKVGHSLQKLQLVIDSVQGASGSFQIGSFYTNFPELASPNLSRSGASPFSNSLPTDQQKLTGMQAKGGTLSPQAQAAKSPSSSCSQSSNSSQCCTSGTQQHRSTNNIAGSEDPVVGESFDDVVLKRVRSYEELHASSQEPRLLPRSQSYKSFREQPIPRLPENGCRMSQEVVDGRRLKVTYGEEKIRLRMQDNWKFQDLLQEIARRFNIDDMSLFDVKYLDDDSDWVLLTCDADLEECIEVCRSSEGQTIKLLLQVSHHLFERRSGSSGNS

SEQ ID NO: 36 - protein, 941 aa, Cucumis melo
MDDGMLSPATMLDAPAETAMDLDYMDGLFLDGCWLETADGTEFLHTSPSSFGVNLDPLIGWPATDMNGDFNMTQISRSNQEEGRKISTDEMSLGRKRIDMGQEECSDQSENNGFEGSEMCRRLWIGPGEHLGSPTSVMERLIRAVGYIKDFVRDKDVLVQVWVPINRGGRNVLITNDLPFSQNSSCTRLTKYRDVSVTYEFTADEDSKKALGLPGRVFSRKVPEWTPDVRFFRSDEYPRVNHAHEHDVRGTVALPIFEQGSKNCLGVIEVVMVTQQVKYGSELENVCKALEAVKLRSSDVIGHPNKKQVFNRSNEAVLLEIQNTLKTACETHGLPLAQTWASCVQQSRGGCRHSDENYSCCVSTVDRACFVADQRIQEFHEACSEHHLLKGEGIVGMAFKSNEPCFSSDITSFCNTEYPLSHHAKLFGLHAAVAIRLRCIYISKTDFVLEFFLPVNCRDPEEQRVLLTSLSTIIQRSCRSLRLVTDKECREENMQQSCRSLHLVTDVKLGEESQFPFGEAGLGANGRSAMQDMSKVQNHQLETSHRTNSSVQNIQQHSGFVSFFQGGKPSEVLSSSGYQHRGFNYDLNGVVEDSDECTTVGNGTLPDVGLGKTGEKRRTKVDKTITLQVLRQYFAGSLKDAAKSIGVCPTTLKRICRQHGIKRWPSRKIKKVGHSLQKLQLVIDSVEGASGAFQIGSLYSNFQELASPNLSGSGSGPPFGAKMGDCLKTSNEVGMSNLQRAASKSPSSSCSQSSSSSQCFSSRSHQNIPHWNEAGSEDQMGGVNPCDGELKRVKSEVEIHVSIMEGSNVPRRSQSCKSLCKHPGAECVVHTAKESNGMAEAVEVQRVKVSFGEEKIRFRVHNRWRHEELLNEIAKRFSISDISKFDLKYLDDESEWVLLTSDTDLQECFHVYKSSRVQTIKLSLQVSRRHKRNFLASSGFS

SEQ ID NO: 37 - protein, 940 aa, Cucumis melo
MDDGMLSPATMLDAPAETAMDLDYMDGLFLDGCWLETADGTEFLHTSPSSFGVNLDPLIGWPATDMNGDFNMTQISRSNQEEGRKISTDEMSLGRKRIDMGQEECSDQSENNGFEGSEMCRRLWIGPGEHLGSPTSVMERLIRAVGYIKDFVRDKDVLVQVWVPINRGGRNVLITNDLPFSQNSSCTRLTKYRDVSVTYEFTADEDSKKALGLPGRVFSRKVPEWTPDVRFFRSDEYPRVNHAHEHDVRGTVALPIFEQGSKNCLGVIEVVMVTQQVKYGSELENVCKALEAVKLRSSDVIGHPNKKVFNRSNEAVLLEIQNTLKTACETHGLPLAQTWASCVQQSRGGCRHSDENYSCCVSTVDRACFVADQRIQEFHEACSEHHLLKGEGIVGMAFKSNEPCFSSDITSFCNTEYPLSHHAKLFGLHAAVAIRLRCIYISKTDFVLEFFLPVNCRDPEEQRVLLTSLSTIIQRSCRSLRLVTDKECREENMQQSCRSLHLVTDVKLGEESQFPFGEAGLGANGRSAMQDMSKVQNHQLETSHRTNSSVQNIQQHSGFVSFFQGGKPSEVLSSSGYQHRGFNYDLNGVVEDSDECTTVGNGTLPDVGLGKTGEKRRTKVDKTITLQVLRQYFAGSLKDAAKSIGVCPTTLKRICRQHGIKRWPSRKIKKVGHSLQKLQLVIDSVEGASGAFQIGSLYSNFQELASPNLSGSGSGPPFGAKMGDCLKTSNEVGMSNLQRAASKSPSSSCSQSSSSSQCFSSRSHQNIPHWNEAGSEDQMGGVNPCDGELKRVKSEVEIHVSIMEGSNVPRRSQSCKSLCKHPGAECVVHTAKESNGMAEAVEVQRVKVSFGEEKIRFRVHNRWRHEELLNEIAKRFSISDISKFDLKYLDDESEWVLLTSDTDLQECFHVYKSSRVQTIKLSLQVSRRHKRNFLASSGFS

SEQ ID NO: 38 - protein, 911 aa, Cucumis melo
MDDGMLSPATMLDAPAETAMDLDYMDGLFLDGCWLETADGTEFLHTSPSSFGVNLDPLIGWPATDMNGDFNMTQISRSNQEEGRKISTDEMSLGRKRIDMGQEECSDQSENNGFEGSEMCRRLWIGPGEHLGSPTSVMERLIRAVGYIKDFVRDKDVLVQVWVPINRGGRNVLITNDLPFSQNSSCTRLTKYRDVSVTYEFTADEDSKKALGLPGRVFSRKVPEWTPDVRFFRSDEYPRVNHAHEHDVRGTVALPIFEQGSKNCLGVIEVVMVTQQVKYGSELENVCKALEAVKLRSSDVIGHPNKKQVFNRSNEAVLLEIQNTLKTACETHGLPLAQTWASCVQQSRGGCRHSDENYSCCVSTVDRACFVADQRIQEFHEACSEHHLLKGEGIVGMAFKSNEPCFSSDITSFCNTEYPLSHHAKLFGLHAAVAIRLRCIYISKTDFVLEFFLPVNCRDPEEQRVLLTSLSTIIQRSCRSLRLVTDKECREENMQQSCRSLHLVTDVKLGEESQFPFGEAGLGANGRSAMQDMSKGGKPSEVLSSSGYQHRGFNYDLNGVVEDSDECTTVGNGTLPDVGLGKTGEKRRTKVDKTITLQVLRQYFAGSLKDAAKSIGVCPTTLKRICRQHGIKRWPSRKIKKVGHSLQKLQLVIDSVEGASGAFQIGSLYSNFQELASPNLSGSGSGPPFGAKMGDCLKTSNEVGMSNLQRAASKSPSSSCSQSSSSSQCFSSRSHQNIPHWNEAGSEDQMGGVNPCDGELKRVKSEVEIHVSIMEGSNVPRRSQSCKSLCKHPGAECVVHTAKESNGMAEAVEVQRVKVSFGEEKIRFRVHNRWRHEELLNEIAKRFSISDISKFDLKYLDDESEWVLLTSDTDLQECFHVYKSSRVQTIKLSLQVSRRHKRNFLASSGFS

SEQ ID NO: 39 - protein, 686 aa, Cucumis melo
MDDGMLSPATMLDAPAETAMDLDYMDGLFLDGCWLETADGTEFLHTSPSSFGVNLDPLIGWPATDMNGDFNMTQISRSNQEEGRKISTDEMSLGRKRIDMGQEECSDQSENNGFEGSEMCRRLWIGPGEHLGSPTSVMERLIRAVGYIKDFVRDKDVLVQVWVPINRGGRNVLITNDLPFSQNSSCTRLTKYRDVSVTYEFTADEDSKKALGLPGRVFSRKVPEWTPDVRFFRSDEYPRVNHAHEHDVRGTVALPIFEQGSKNCLGVIEVVMVTQQVKYGSELENVCKALEAVKLRSSDVIGHPNKKQVFNRSNEAVLLEIQNTLKTACETHGLPLAQTWASCVQQSRGGCRHSDENYSCCVSTVDRACFVADQRIQEFHEACSEHHLLKGEGIVGMAFKSNEPCFSSDITSFCNTEYPLSHHAKLFGLHAAVAIRLRCIYISKTDFVLEFFLPVNCRDPEEQRVLLTSLSTIIQRSCRSLRLVTDKECREENMQQSCRSLHLVTDVKLGEESQFPFGEAGLGANGRSAMQDMSKVQNHQLETSHRTNSSVQNIQQHSGFVSFFQGGKPSEVLSSSGYQHRGFNYDLNGVVEDSDECTTVGNGTLPDVGLGKTGEKRRTKVDKTITLQVLRQYFAGSLKDAAKSIGVCPTTLKRICRQHGIKRWPSRKIKKVQVQVHLLVQRWEIA

SEQ ID NO: 40 - protein, 941 aa, Cucumis sativus
MDDGMLSPATMLDAPAETAMDLDYMDGLFLDGCWLETADGTEFLHTSPSSFGVNLDALIGWPATEMNGDFNMTQISRSNQEEERKISTDEMSLGRKRIDMGQEGCSGQSENNGFGGSELCRRLWIGPGEHLGTPTSVMERLITAVGYIKDFVRDKDVLVQVWVPINRGGRSVLITNDLPFSQNSSCTRLTKYRDVSVTYEFTADEDSKKALGLPGRVFSRKVPEWTPDVRFFRSDEYPRVNHAHEHDVRGTVALPIFEQGSKNCLGVIEVVMVTQQIKYGSELENVCKALEAVKLRSSDVMGHPNKKVFNRSNEAVLQEIQNTLKSACETHGLPLAQTWASCMQQSRGGCRHSDENYSCCVSTVDRACFVADQRIQEFHEACSEHHLLKGEGIVGMAFKSNEPCFSSDITSFCNTEYPLSHHAKLFGLHAAVAIRLRCIYISKTDFVLEFFLPVNCRNPEDQRVLLTSLSTIIQRSCRSLRLVTDRECSEENMQQSYRSLHLVTDVKLGEQSKFPFGEAGFVANGRSAMQEMSKVQNHQLETSHPTTSSVQNIQQHSGFVSFFQGGKPSEVLSSSGYQHRGFNYDLNGVVEDSEECATVGNGSFPDVGLGKTGEKRRTKVDKTITLQVLRQYFAGSLKDAAKSIGVCPTTLKRICRQHGIKRWPSRKIKKVGHSLQKLQLVIDSVEGASGAFQIGSLYSNFQELASPNLSGSGSGPPFGAKMGDCLKTSNEVGMSNLQGAASKSPSSSCSQSSSSSQCFSSRSNQNLPHWNEAGSEDQMGGGVNPCDGELKRVKSEVEIHVSIMEGSNVPRRSQSCKSLCKHPATECAMHTAKESNGMAEAVEVQRVKVSFGEEKIRFRVHNRWGYEELLNEIAKRFSISDISKFDLKYLDDESEWVLITSDTDLQECFHVYKSSQVQTIKLSLQVSRRHKRNYLASSGFS

SEQ ID NO: 41 - protein, 942 aa, Cucumis sativus
MDDGMLSPATMLDAPAETAMDLDYMDGLFLDGCWLETADGTEFLHTSPSSFGVNLDALIGWPATEMNGDFNMTQISRSNQEEERKISTDEMSLGRKRIDMGQEGCSGQSENNGFGGSELCRRLWIGPGEHLGTPTSVMERLITAVGYIKDFVRDKDVLVQVWVPINRGGRSVLITNDLPFSQNSSCTRLTKYRDVSVTYEFTADEDSKKALGLPGRVFSRKVPEWTPDVRFFRSDEYPRVNHAHEHDVRGTVALPIFEQGSKNCLGVIEVVMVTQQIKYGSELENVCKALEAVKLRSSDVMGHPNKKQVFNRSNEAVLQEIQNTLKSACETHGLPLAQTWASCMQQSRGGCRHSDENYSCCVSTVDRACFVADQRIQEFHEACSEHHLLKGEGIVGMAFKSNEPCFSSDITSFCNTEYPLSHHAKLFGLHAAVAIRLRCIYISKTDFVLEFFLPVNCRNPEDQRVLLTSLSTIIQRSCRSLRLVTDRECSEENMQQSYRSLHLVTDVKLGEQSKFPFGEAGFVANGRSAMQEMSKVQNHQLETSHPTTSSVQNIQQHSGFVSFFQGGKPSEVLSSSGYQHRGFNYDLNGVVEDSEECATVGNGSFPDVGLGKTGEKRRTKVDKTITLQVLRQYFAGSLKDAAKSIGVCPTTLKRICRQHGIKRWPSRKIKKVGHSLQKLQLVIDSVEGASGAFQIGSLYSNFQELASPNLSGSGSGPPFGAKMGDCLKTSNEVGMSNLQGAASKSPSSSCSQSSSSSQCFSSRSNQNLPHWNEAGSEDQMGGGVNPCDGELKRVKSEVEIHVSIMEGSNVPRRSQSCKSLCKHPATECAMHTAKESNGMAEAVEVQRVKVSFGEEKIRFRVHNRWGYEELLNEIAKRFSISDISKFDLKYLDDESEWVLITSDTDLQECFHVYKSSQVQTIKLSLQVSRRHKRNYLASSGFS

SEQ ID NO: 42 - protein, 912 aa, Cucumis sativus
MDDGMLSPATMLDAPAETAMDLDYMDGLFLDGCWLETADGTEFLHTSPSSFGVNLDALIGWPATEMNGDFNMTQISRSNQEEERKISTDEMSLGRKRIDMGQEGCSGQSENNGFGGSELCRRLWIGPGEHLGTPTSVMERLITAVGYIKDFVRDKDVLVQVWVPINRGGRSVLITNDLPFSQNSSCTRLTKYRDVSVTYEFTADEDSKKALGLPGRVFSRKVPEWTPDVRFFRSDEYPRVNHAHEHDVRGTVALPIFEQGSKNCLGVIEVVMVTQQIKYGSELENVCKALEAVKLRSSDVMGHPNKKQVFNRSNEAVLQEIQNTLKSACETHGLPLAQTWASCMQQSRGGCRHSDENYSCCVSTVDRACFVADQRIQEFHEACSEHHLLKGEGIVGMAFKSNEPCFSSDITSFCNTEYPLSHHAKLFGLHAAVAIRLRCIYISKTDFVLEFFLPVNCRNPEDQRVLLTSLSTIIQRSCRSLRLVTDRECSEENMQQSYRSLHLVTDVKLGEQSKFPFGEAGFVANGRSAMQEMSKGGKPSEVLSSSGYQHRGFNYDLNGVVEDSEECATVGNGSFPDVGLGKTGEKRRTKVDKTITLQVLRQYFAGSLKDAAKSIGVCPTTLKRICRQHGIKRWPSRKIKKVGHSLQKLQLVIDSVEGASGAFQIGSLYSNFQELASPNLSGSGSGPPFGAKMGDCLKTSNEVGMSNLQGAASKSPSSSCSQSSSSSQCFSSRSNQNLPHWNEAGSEDQMGGGVNPCDGELKRVKSEVEIHVSIMEGSNVPRRSQSCKSLCKHPATECAMHTAKESNGMAEAVEVQRVKVSFGEEKIRFRVHNRWGYEELLNEIAKRFSISDISKFDLKYLDDESEWVLITSDTDLQECFHVYKSSQVQTIKLSLQVSRRHKRNYLASSGFS

SEQ ID NO: 43 - protein, 686 aa, Cucumis sativus
MDDGMLSPATMLDAPAETAMDLDYMDGLFLDGCWLETADGTEFLHTSPSSFGVNLDALIGWPATEMNGDFNMTQISRSNQEEERKISTDEMSLGRKRIDMGQEGCSGQSENNGFGGSELCRRLWIGPGEHLGTPTSVMERLITAVGYIKDFVRDKDVLVQVWVPINRGGRSVLITNDLPFSQNSSCTRLTKYRDVSVTYEFTADEDSKKALGLPGRVFSRKVPEWTPDVRFFRSDEYPRVNHAHEHDVRGTVALPIFEQGSKNCLGVIEVVMVTQQIKYGSELENVCKALEAVKLRSSDVMGHPNKKQVFNRSNEAVLQEIQNTLKSACETHGLPLAQTWASCMQQSRGGCRHSDENYSCCVSTVDRACFVADQRIQEFHEACSEHHLLKGEGIVGMAFKSNEPCFSSDITSFCNTEYPLSHHAKLFGLHAAVAIRLRCIYISKTDFVLEFFLPVNCRNPEDQRVLLTSLSTIIQRSCRSLRLVTDRECSEENMQQSYRSLHLVTDVKLGEQSKFPFGEAGFVANGRSAMQEMSKVQNHQLETSHPTTSSVQNIQQHSGFVSFFQGGKPSEVLSSSGYQHRGFNYDLNGVVEDSEECATVGNGSFPDVGLGKTGEKRRTKVDKTITLQVLRQYFAGSLKDAAKSIGVCPTTLKRICRQHGIKRWPSRKIKKVQVQVHLLVQRWEIA

SEQ ID NO: 44 - protein, 915 aa, Cucurbita maxima
MEDCMLSPATMLDAPAEAAMDLDYMDGLLLEGCWLETAEGTEFLHPSTASFGANLDPLIAWPTTDMNGDFHMSQITRTNHEEPRRILTDEASMGRGRVDMEQEGCSGQSENHGFEGSELCRRLWIGPGDHLGSASSVMEKLIRAVGYIKDFVRDKDVLVQVWVPINRGGRNVLITNDLPFSQNSSCTRLTKYRDVSVKYEFTADDDSKNALGLPGRVFSRKVPEWTPDVRFFRSDEYPRVNHAHEHDVRGTVALPIFEQGSKNCLGVIEVVMVTQQIKYGSELESVCKALEAVKLRSSDVIGHPDKKQVFNRSNEAVLQEIQNTLKSACETHGLPLAQTWASCIQQNREGCRHSDENYSCCVSTVDRACFVADPRVQEFHEACSEHHLLKGEGIVGMAFKSNEPCFSSDITSFCNTEYPLSHHAKLFRLHAAVAIRLRCIYNSKTDFVLEFFLPVDCRDPEEQRVLLTSLSTIIQRSCRSLRLVNDKECREENMQQSCRRSKVEHQQLEMSHPTNSLLTSSVQNIQQQSGFVSLFQDGKTSEILSSSGYQHHELNYNLNGVVEDSEECATVGNSCFSDTGLGRTGEKRRTKVDKTITLQVLRQYFAGSLKDAAKSIGVCPTTLKRICRQHGIKRWPSRKIKKVGHSLQKLQLVIDSVEGASGAFQIGSLYSNFQDLASPNLSGSGPVLSAKMGDCMKTSSNPNEVGMSNLQGGGASKSPSSSCSQSSSSNQCFSSRSHRSVGHWNKGGSEDQMGGGENPCDGELKRVKSEVEIHVSIMEGSNIPRRSQSCKSLCKHPATECLVHSANEGDGMAERVEVQKVKVSYGEEKIRFRVHNQWRYEELLNEVGKRFSISDMSKFDLKYLDDESEWVLLTSDTDLEECFHVYKSCRIQTIRLSVQESRRHKRNCVVSGGFS

SEQ ID NO: 45 - protein, 914 aa, Cucurbita maxima
MEDCMLSPATMLDAPAEAAMDLDYMDGLLLEGCWLETAEGTEFLHPSTASFGANLDPLIAWPTTDMNGDFHMSQITRTNHEEPRRILTDEASMGRGRVDMEQEGCSGQSENHGFEGSELCRRLWIGPGDHLGSASSVMEKLIRAVGYIKDFVRDKDVLVQVWVPINRGGRNVLITNDLPFSQNSSCTRLTKYRDVSVKYEFTADDDSKNALGLPGRVFSRKVPEWTPDVRFFRSDEYPRVNHAHEHDVRGTVALPIFEQGSKNCLGVIEVVMVTQQIKYGSELESVCKALEAVKLRSSDVIGHPDKKVFNRSNEAVLQEIQNTLKSACETHGLPLAQTWASCIQQNREGCRHSDENYSCCVSTVDRACFVADPRVQEFHEACSEHHLLKGEGIVGMAFKSNEPCFSSDITSFCNTEYPLSHHAKLFRLHAAVAIRLRCIYNSKTDFVLEFFLPVDCRDPEEQRVLLTSLSTIIQRSCRSLRLVNDKECREENMQQSCRRSKVEHQQLEMSHPTNSLLTSSVQNIQQQSGFVSLFQDGKTSEILSSSGYQHHELNYNLNGVVEDSEECATVGNSCFSDTGLGRTGEKRRTKVDKTITLQVLRQYFAGSLKDAAKSIGVCPTTLKRICRQHGIKRWPSRKIKKVGHSLQKLQLVIDSVEGASGAFQIGSLYSNFQDLASPNLSGSGPVLSAKMGDCMKTSSNPNEVGMSNLQGGGASKSPSSSCSQSSSSNQCFSSRSHRSVGHWNKGGSEDQMGGGENPCDGELKRVKSEVEIHVSIMEGSNIPRRSQSCKSLCKHPATECLVHSANEGDGMAERVEVQKVKVSYGEEKIRFRVHNQWRYEELLNEVGKRFSISDMSKFDLKYLDDESEWVLLTSDTDLEECFHVYKSCRIQTIRLSVQESRRHKRNCVVSGGFS

SEQ ID NO: 46 - protein, 797 aa, Cucurbita maxima
MLEAPADIAMDFDYMDGLLLDDCWLETADGAVFLHPNLSSFGANLDPLIGWPATEMNGVFNTNLITRSDQEEPRNMLSNEASPGQERVDVGQEGCSDQSENDALEGSELCRRLGMGAGEHMGSAPSVMERLIMAVGYIKDIVRDKDVLVQVWVPVSRGERSVLITNQLPFSQNSSCTRLAKYRDVSVNYEFTADEDSKKALGLPGRVFLRKVPEWTPDVRFFRSDEYPRVDHAHEHDVRGTIALPVFEQGSKSCLGVIEVVMVTQQIKYGSEHEILCKALQAVKLRSSDVISPPNRKVFNRFNEAVLLEIRDTLRTACETHGLPLAQAWASCIQESKEGCRHSDENYSCCVSTVDRACFVADTRIQDFHEACSEHHLLKGEGIVGMAFKSNKPCFSSDITSFRNTDYPLSHHAKLFGLHAAVALRLRCIFISKTDFVLEFFLPVHCRDPEDQRILLSSLSTVIQYSCRNLRLVTDKECREENMEQVHPTSSLLASSVQNIQQCSGSVSLFQELNYDLNGVVEDSEECPTVGNGIFADTSMGRTGEKRRNKVEKSITLEVLRQYFAGSLKDAAKSIGVCPTTLKRICRQHGIKRWPSRKIKKVGHSLQKLRLVIDSVNSASGAFQTSSLYSNLQELASPYVRKMGDGLKTSGDLGDAASKTAPSSLSQSSNSSQCFSFCRHPATGCVMQTAKESDQMRVKVSYGEERIRFRVQKWWSYKELVKEVGRRFNIRDTSKYELKYLDDECEWVLLTSDAYLQDCFHMYKSSPLQTIKLLLHPSPRHKREEPQTPPFPTFYML

SEQ ID NO: 47 - protein, 917 aa, Cucurbita moschata
MEDCMLSPATMLDAPAEAAMDLDYMDGLLLEGCWLETAEGTEFLHPSTASFGANLDPLIAWPATDMNGDFHMSQITRANQEEPRRILTDEASMGRGRVDMEQEGCSGQSENHGFEGSELCRRLWIGPGDHLGSASSVMEKLIRAVGYIKDFVRDKDVLVQVWVPINRGGRSVLITNDLPFSQNSSCTRLTKYRDVSVKYEFTADDDSKNALGLPGRVFSRKVPEWTPDVRFFRSDEYPRVNHAHEHDVRGTVALPIFEQGSKNCLGVIEVVMVTQQIKYGSELESVCKALEAVKLRSSDVIGHPDKKQVFNRSNEAVLLEIQNTLKSACETHGLPLAQTWASCIQQNREGCRHSDENYSCCVSTVDRACFVADPRVQEFHEACSEHHLLKGEGIVGMAFKSNEPCFSSDITSFCNTEYPLSHHAKLFGLHAAVAIRLRCIYISKTDFVLEFFLPVDCIDPEEQRVLLTSLSTIIQRSCRSLRLVNDKECREENMQQSCRRSKVEHHQLEMSHPTNSLLTSSVQNIQQQSGFVSLFQDGKTSEILSSSGYQHHELNYNLNGVVEDSEECATVGNSCFSDTGLGRTGEKRRTKVDKTITLQVLRQYFAGSLKDAAKSIGVCPTTLKRICRQHGIKRWPSRKIKKVGHSLQKLQLVIDSVEGASGAFQIGSLYSNFQDLASPNLSGSGSGPVLSAKMGDCMKTSSNPNEVGMSNLQGGGASKSPSSSCSQSSSSNQCFSSRSHKNVGHWNKGGSEDQMGGGENPCDGELKRVKSEVEIHVSIMEGSNIPRRSQSCKSLCKHPATECLVHTAKEGDGMAERVEVQKVKVSYGEEKIRFRVHNQWRYEELLNEVGKRFSISDMTKFDLKYLDDESEWVLLTSDTDLQECFHVYKSCRIQTIRLLVQESRRHKRNCVASGGFS

SEQ ID NO: 48 - protein, 916 aa, Cucurbita moschata
MEDCMLSPATMLDAPAEAAMDLDYMDGLLLEGCWLETAEGTEFLHPSTASFGANLDPLIAWPATDMNGDFHMSQITRANQEEPRRILTDEASMGRGRVDMEQEGCSGQSENHGFEGSELCRRLWIGPGDHLGSASSVMEKLIRAVGYIKDFVRDKDVLVQVWVPINRGGRSVLITNDLPFSQNSSCTRLTKYRDVSVKYEFTADDDSKNALGLPGRVFSRKVPEWTPDVRFFRSDEYPRVNHAHEHDVRGTVALPIFEQGSKNCLGVIEVVMVTQQIKYGSELESVCKALEAVKLRSSDVIGHPDKKVFNRSNEAVLLEIQNTLKSACETHGLPLAQTWASCIQQNREGCRHSDENYSCCVSTVDRACFVADPRVQEFHEACSEHHLLKGEGIVGMAFKSNEPCFSSDITSFCNTEYPLSHHAKLFGLHAAVAIRLRCIYISKTDFVLEFFLPVDCIDPEEQRVLLTSLSTIIQRSCRSLRLVNDKECREENMQQSCRRSKVEHHQLEMSHPTNSLLTSSVQNIQQQSGFVSLFQDGKTSEILSSSGYQHHELNYNLNGVVEDSEECATVGNSCFSDTGLGRTGEKRRTKVDKTITLQVLRQYFAGSLKDAAKSIGVCPTTLKRICRQHGIKRWPSRKIKKVGHSLQKLQLVIDSVEGASGAFQIGSLYSNFQDLASPNLSGSGSGPVLSAKMGDCMKTSSNPNEVGMSNLQGGGASKSPSSSCSQSSSSNQCFSSRSHKNVGHWNKGGSEDQMGGGENPCDGELKRVKSEVEIHVSIMEGSNIPRRSQSCKSLCKHPATECLVHTAKEGDGMAERVEVQKVKVSYGEEKIRFRVHNQWRYEELLNEVGKRFSISDMTKFDLKYLDDESEWVLLTSDTDLQECFHVYKSCRIQTIRLLVQESRRHKRNCVASGGFS

SEQ ID NO: 49 - protein, 788 aa, Cucurbita moschata
MDFDYMDGLLLDDCWLETADGTVFLHPNLSSFGANLDPLIGWPATEMNGVFNTNLITRSDQEEPRNMLSNEASPGRERVDVGQEGCSDQSENNALEGSELCRRLGMGAGEHMGSAPSVMERLIMAVGYIKDIVRDKDVLVQVWVPVSRGGRSVLITNQLPFSQNSSCTRLAKYRDVSVNYEFTADEDSKKALGLPGRVFLRKVPEWTPDVRFFRSDEYPRVDHAHEHDVRGTIALPVFEQGSKSCLGVIEVVMVTQQIKYGSEHEILCKALQAVKLRSSDVISPPNQKVFNRFNEAVLLEIRDTLRTACETHGLPLAQAWASCIQQSKEGCRHSDENYSCCVSTVDRACFVADTRIQDFHEACSEHHLLKGEGIVGMAFKSNEPCFSSDITSFRNTEYPLSHHAKLFGLHAAVALRLRCIFISKTDFVLEFFLPVHCRDPEEQRILLTSLSTVIQYSCRNLRLVTDKECREENMEQLHPTNSLLASSVQNIQQCSGSVSLLQELNYDQNGVVEDSEECPTVGNGIFADISMGRTGEKRRTKVEKSITLEVLRQYFAGSLKDAAKSIGVCPTTLKRICRQHGIKRWPSRKIKKVGHSLQKLQLVIDSVNSASGAFQTSSLYSNLQELASPYVRKMGDGLKASSNIRDAASKTAPSSLSQSSNSSQCFSFCRHPATGCVMQTAKESDQMRVKVSYGEERIRFRVQKWWRYEELVKEVGRRFNIRDISKYDLKYLDDECEWVLLTSDAYLQDCFHMYKSSPLQTIKLLLLPSPRHKREEPQTPSFPTFYML

SEQ ID NO: 50 - protein, 757 aa, Cucurbita moschata
MFVLPKHGLEFLLLEMNGVFNTNLITRSDQEEPRNMLSNEASPGRERVDVGQEGCSDQSENNALEGSELCRRLGMGAGEHMGSAPSVMERLIMAVGYIKDIVRDKDVLVQVWVPVSRGGRSVLITNQLPFSQNSSCTRLAKYRDVSVNYEFTADEDSKKALGLPGRVFLRKVPEWTPDVRFFRSDEYPRVDHAHEHDVRGTIALPVFEQGSKSCLGVIEVVMVTQQIKYGSEHEILCKALQAVKLRSSDVISPPNQKVFNRFNEAVLLEIRDTLRTACETHGLPLAQAWASCIQQSKEGCRHSDENYSCCVSTVDRACFVADTRIQDFHEACSEHHLLKGEGIVGMAFKSNEPCFSSDITSFRNTEYPLSHHAKLFGLHAAVALRLRCIFISKTDFVLEFFLPVHCRDPEEQRILLTSLSTVIQYSCRNLRLVTDKECREENMEQLHPTNSLLASSVQNIQQCSGSVSLLQELNYDQNGVVEDSEECPTVGNGIFADISMGRTGEKRRTKVEKSITLEVLRQYFAGSLKDAAKSIGVCPTTLKRICRQHGIKRWPSRKIKKVGHSLQKLQLVIDSVNSASGAFQTSSLYSNLQELASPYVRKMGDGLKASSNIRDAASKTAPSSLSQSSNSSQCFSFCRHPATGCVMQTAKESDQMRVKVSYGEERIRFRVQKWWRYEELVKEVGRRFNIRDISKYDLKYLDDECEWVLLTSDAYLQDCFHMYKSSPLQTIKLLLLPSPRHKREEPQTPSFPTFYML

SEQ ID NO: 51 - protein, 788 aa, Cucurbita pepo
  REGION 1..788: note = subsp. pepo
MDFDYMDGLLLDDCWLETADGTVFLHPNLSSFGANLDPLIGWPATEMNGVFNTNLITRSDQEEPRNMLSNEASPGRERVDVGQEGCSDQSENNALEGSELCRRLGMGAGEHMGSAPSVMERLIMAVEYIKDIVRDKDVLVQVWVPVSRGGRSVLITNQLPFSQNSSCTRLAKYRDVSVNYEFTADEESKKALGLPGRVFLRKVPEWTPDVRFFRSDEYPRVDHAHEHDVRGTIALPVFEQGSKSCLGVIEVVMVTQQIKYGSEHEILCKALQAVKLRSSDVISPPNQKVFNRFNEAVLLEIRDTLRTACETHGLPLAQAWASCIQQSKEGCRHSDENYSCCVSTVDRACFVADTRIQDFHEACSEHHLLKGEGIVGMAFKSNEPCFSSDIASFRNTEYPLSHHAKLFGLHAAVALRLRCIFISKMDFVLEFFLPVHCRDPEEQRILLTSLSTVIQYSCRNLRLVTDEECREENMEQPLPTNSLLASSVQNIQQCSGSVSLLQELNYDLNGVVEDSEECPTVGNGIFADISMGRTGEKRRTKVEKSITLEVLRQYFAGSLKDAAKSIGVCPTTLKRICRQHGIKRWPSRKIKKVGHSLQKLQLVIDSVNSASGAFQTSSLYSNLQELASPYVRKMGDGLKTSSDLGDAASKTAPSSLSQSSNSSQCFSFCRHPATGCVMQTAKESDQMRVKVSYGEERIRFRVQKWWRYEELVKEVGRRFNIRDISKYDLKYLDDECEWVLLTSDAYLQDCFHMYKSSPLQTIKLLLHPSPRHMREEPQTPPFPTFYML

SEQ ID NO: 52 - protein, 757 aa, Cucurbita pepo
  REGION 1..757: note = subsp. pepo
MFVLPKHGLEFLLLEMNGVFNTNLITRSDQEEPRNMLSNEASPGRERVDVGQEGCSDQSENNALEGSELCRRLGMGAGEHMGSAPSVMERLIMAVEYIKDIVRDKDVLVQVWVPVSRGGRSVLITNQLPFSQNSSCTRLAKYRDVSVNYEFTADEESKKALGLPGRVFLRKVPEWTPDVRFFRSDEYPRVDHAHEHDVRGTIALPVFEQGSKSCLGVIEVVMVTQQIKYGSEHEILCKALQAVKLRSSDVISPPNQKVFNRFNEAVLLEIRDTLRTACETHGLPLAQAWASCIQQSKEGCRHSDENYSCCVSTVDRACFVADTRIQDFHEACSEHHLLKGEGIVGMAFKSNEPCFSSDIASFRNTEYPLSHHAKLFGLHAAVALRLRCIFISKMDFVLEFFLPVHCRDPEEQRILLTSLSTVIQYSCRNLRLVTDEECREENMEQPLPTNSLLASSVQNIQQCSGSVSLLQELNYDLNGVVEDSEECPTVGNGIFADISMGRTGEKRRTKVEKSITLEVLRQYFAGSLKDAAKSIGVCPTTLKRICRQHGIKRWPSRKIKKVGHSLQKLQLVIDSVNSASGAFQTSSLYSNLQELASPYVRKMGDGLKTSSDLGDAASKTAPSSLSQSSNSSQCFSFCRHPATGCVMQTAKESDQMRVKVSYGEERIRFRVQKWWRYEELVKEVGRRFNIRDISKYDLKYLDDECEWVLLTSDAYLQDCFHMYKSSPLQTIKLLLHPSPRHMREEPQTPPFPTFYML

SEQ ID NO: 53 - protein, 917 aa, Cucurbita pepo
  REGION 1..917: note = subsp. pepo
MEDCMLSPATMLDAPAEAAMDLDYMDGLLLEGCWLETAEGTEFLHPSTASFGANLDPLIAWPATDMNGDFHMSQITRTNQEEPRRILTDEASMGRGRVDMEQEGCSGQSENHGFEGSELCRRLWIGPGDHLGSASSVMEKLIRAVGYIKDFVRDKDVLVQVWVPINRGGRSVLITNDLPFSQNSSCTRLSKYRDVSVKYEFTADDDSKNALGLPGRVFSRKVPEWTPDVRFFRSDEYPRVNHAHEHDVRGTVALPIFEQGSKNCLGVIEVVMVTQQIKYGSELESVCKALEAVKLRSSDVIGHPDKKQVFNRSNEAVLQEIQNTLKSACETHGLPLAQTWASCIQQNREGCRHSDENYSCCVSTVDRACFVADPRVQEFHEACSEHHLLKGEGIVGMAFKSNEPCFSSDITSFCNTEYPLSHHAKLFGLHAAVAIRLRCIYINKTDFVLEFFLPVDCIDPEEQRVLLTSLSTIIQRSCRSLRLVNDKECREENMQQSCRRSKVEHHQLEISHPTNSLLTSSVQNIQQQSGFVSLFQDGKTSEMLSSSGYQHHELNYNLNGVVEDSEECATVGNSCFSDTGLGRTGEKRRTKVDKTITLQVLRQYFAGSLKDAAKSIGVCPTTLKRICRQHGIKRWPSRKIKKVGHSLQKLQLVIDSVEGASGAFQIGSLYSNFQDLASPNLSGSGSGPVVSAKMGDCMKTSSNPNEVGMSNLQGGGASKSPSSSCSQSSSSNQCFSSRSHKNVGHWNKGGSEDQMGGGENPCDGELKRVKSEVEIHVSIMEGSNIPRRSQSCKSLCKHPATECLVHSAKEGDGMAERVEVQKVKVSYGEEKIRFRVHNQWRYEELLNEVGKRFSISDMTKFDLKYLDDESEWVLLTSDTDLQECFHVYKSCRIQTIRLLVQESRRRKRNCVASGGFS

SEQ ID NO: 54 - protein, 916 aa, Cucurbita pepo
  REGION 1..916: note = subsp. pepo
MEDCMLSPATMLDAPAEAAMDLDYMDGLLLEGCWLETAEGTEFLHPSTASFGANLDPLIAWPATDMNGDFHMSQITRTNQEEPRRILTDEASMGRGRVDMEQEGCSGQSENHGFEGSELCRRLWIGPGDHLGSASSVMEKLIRAVGYIKDFVRDKDVLVQVWVPINRGGRSVLITNDLPFSQNSSCTRLSKYRDVSVKYEFTADDDSKNALGLPGRVFSRKVPEWTPDVRFFRSDEYPRVNHAHEHDVRGTVALPIFEQGSKNCLGVIEVVMVTQQIKYGSELESVCKALEAVKLRSSDVIGHPDKKVFNRSNEAVLQEIQNTLKSACETHGLPLAQTWASCIQQNREGCRHSDENYSCCVSTVDRACFVADPRVQEFHEACSEHHLLKGEGIVGMAFKSNEPCFSSDITSFCNTEYPLSHHAKLFGLHAAVAIRLRCIYINKTDFVLEFFLPVDCIDPEEQRVLLTSLSTIIQRSCRSLRLVNDKECREENMQQSCRRSKVEHHQLEISHPTNSLLTSSVQNIQQQSGFVSLFQDGKTSEMLSSSGYQHHELNYNLNGVVEDSEECATVGNSCFSDTGLGRTGEKRRTKVDKTITLQVLRQYFAGSLKDAAKSIGVCPTTLKRICRQHGIKRWPSRKIKKVGHSLQKLQLVIDSVEGASGAFQIGSLYSNFQDLASPNLSGSGSGPVVSAKMGDCMKTSSNPNEVGMSNLQGGGASKSPSSSCSQSSSSNQCFSSRSHKNVGHWNKGGSEDQMGGGENPCDGELKRVKSEVEIHVSIMEGSNIPRRSQSCKSLCKHPATECLVHSAKEGDGMAERVEVQKVKVSYGEEKIRFRVHNQWRYEELLNEVGKRFSISDMTKFDLKYLDDESEWVLLTSDTDLQECFHVYKSCRIQTIRLLVQESRRRKRNCVASGGFS

SEQ ID NO: 55 - protein, 658 aa, Eucalyptus grandis
MTTQKIQYRPEIQSVCKALEAFDLRSSEVFGNLSEESHWKSYEAAIPEIREVLRSACETHGLPLAQTWVPCSQQGKGGCRHSNENYVHCVSTIDHACHVADPLLQPFHEACSEHHLLKGQGVVGRAFQTNQPCFSSDITSSGRTEYPLSHHARMFGLCAAVAIRLRSIHTGTADFVLEFFLPMDCKDHDKQKKMLGSLSIIIQQVCQSLRVITNEELEEETVLPEIPVPSEGRPQGEWSLEVESNYLERCSEEDLSWSAHVEKVQQSDTVASATQKARAGESFVEKSLDFGQFQDSSTERGEDCSFYGEGRCSDAAREKTGDKKRTKAEKAITLQVLRQYFAGSLKDAAKSLGVCPTTLKRICRQHGIKRWPSRKIKKVGHSLQKLQLVMDTVRVQGAPGPLQIDSFYTNFPELASPNLSITSPLSASNHGDHLQPLGTQPGALNFDSCAAVSKSTSSSCSHSSSSSQCCSSGTKQHPSIVDLVAEEDHLVSENNVDITPSKMVQSHVELQGSSQEEQKLLPRSQSRRSFNPNMENPPRPPPQYNCQASREGDPLRVKVACADENIRFRMQKDWDLKDLWGEIARRFCIEDTSKFDLKYLDDDSEWVLLTCDADLDECIDVSRSSPGSTVKLSVRKSHHRRLGSSLGSSGPPRMHGAS

SEQ ID NO: 56 - protein, 924 aa, Eucalyptus grandis
MEDGPPTPKSPFENISDDKMDLDLLDDFFLDGCWVETAAAFSLFPQSPTFAAPNEAPNHSLSEETLTGIPSTDSYQNAFQEETRGNTAPGIPPSADPQTSELAESRIQDVNSVGNATSLGQVEGTEVSQSLWVAPKSSLGLSSSIKLRLMQAISHLSESSKGKDMLIQIWVPVGREGRKVLTTDDQPFSLGLSSRSLQRYRSVSKSYQFQADDGSKDHLGLPGRAFLGKLPEWTPDVRLFSTEEYPRINYARQYDVRGSLAVPVFERGSGTCLGVVEIVTTSEKINCRSDLENVCKALEAVDLRSTQSFNPSIVKVDVLYEAVIPRILEALKSVTKTYNLPLALTWASCIKQGKEGCRHSDENYSLCLSTMDSACLVVDLEMRGFHEACSEHHLLKGQGIVGKAFTTDKPSFSNDVTAISHTEYPLSHHARLFRLQSALAIPVINIYTGLAEFVLELFLPKDCGDMEEGKRMLNFLCADIHQAFQNSQFFTEKDLSGAIVLPFKETEIATEKKLQKKETEVASSSRKRTSSDESSWMAHMVETQTKGNGVSISSTYDMGTKEPFNITTQHQEFWHLQQDSEHITGVEGRSDSLSLSQHSRGSGKDGQKRQTKMEKTITVDVLRQYFAGSLKDAAKELGVCPTTLKRICRQHGIARWPSRKIKKVNHSLKKLQHVIDSVQGAKGTIKLGSFYESFPELSTEISGEGPSSSKQSDPPKKTDHQPDINIDNSAATISKSPSASCSQCSTSTTSGSNEANVHSTTILASSGRNDQISEDPFELLKRARSHAELHEPQILARSHSHMSFDQHPLPNIQGHHLQDGLIFRVKAMFGEEKIRLVLQPTWGFADLRQEIAKRFSIDDVGGIDLKYLDDDGEWVLLTCDADLEECMDVYRTSQGHTIRMSVHPASHPHRNSLGSSGHTDKRFL

SEQ ID NO: 57 - protein, 926 aa, Eucalyptus grandis
MEDVAFTPNFTSESLLDSAMDLDLMDQLLLEGCWLETTDASNYPFRGIFQEEAGKDFAESPPSTCPRIEERLEMEQKNINPFEATASSSQSEGFQIEGTEVGRRCWIAPTANPGPSSSMKQRLMMVLGRLKECTKDKDVLVQIWVPVKKGGRNVLTTIDQPYVYNPNSKSLESYRNVSKTYQFLADEETKESVGLPGRVFLGKLPEWTPDVRFFSSEEYPRRDYAQQYDVRGSLALPVFERGSGTCLGVVEIITTSQKINYRPELETVCKALEAVDLRSSQTFRPPSAKACNQSHQAALPQILEVLTSVCRQYRLPLALTWASCLQQGKEGPRHSNENYEFCVSTVDSACFVADQHYLGFQEACSEHHLLRGQGIVGRAFTINQPCFAADITAFSRKEYPLAHHARMLGLCCATAIPLASIHTGSVDFVLEFFLPRDCRDAEEQKQMINSLSSFVCQTLQNSQKEQKETLVSSTRYTGVNTSDKRIQAEETDKLLPSLNKRHPQEVSWIANMVEAQKNSKGISVPFEVQKEPKEEFTVTTKWEETEIGLQHGQFHPEFHRVQQNLENKPNVEGGDTLGQFPSIGGRKSGQRTRTKTEKTISLDVLRQYFAGSLKDAARSIGVCPTTLKRICRQHGITRWPSRKIKKVGHSLKKLESIINSVQGAEGTIRIRSFYESFPELNSPRHSEKGTFSSANLGNPLEQLNPQTENGLFSSGATTSNSPSSSCSQSSGSTTSFSTGTKQCFTAITALSSGDPVMSNNPSEVLKRTRSDAELHISTHEEPKPLIRSQSHKSLDEWGSLENVATLPKTNSPRITRDLGIYRIKAILGEEKIRFSLKPSWGLRDLQREVANRFNIEDIGTIDLKYLDDDQEWVLLTCDADLEECIDVYRMSRNHTIRISIHQSSHQNLSSLGGSSGEAQHRGHIHL

SEQ ID NO: 58 - protein, 907 aa, Eucalyptus grandis
MEDGVLSPATMMGAPADSTMDLDFMDELFLDGCWLETTEGPGFPNQSPLSSGAIMDSSFFWPTSGTNGNFGMNPFQISNQAQTPLFNELQEEAPASMQSPNQNMTDVVGFSGQSENPIIQGHEFSRGIWIGPIENRISAPSVMERLKRALVYMKDVMRDKNVLVQVWLPVNRGGRRVLTTNDLLSSLDSSCPRLAKYHDISVNYQFSTGEDSKELVKGLPGRVFSAKVPEWTPDVRFFRNDEYPRVDDAQRYDVRGTLALPIFEQGSRTCLGVIEVVTTTQKVQYQPELESVCKALEAVDLRSSENLNTHNIKVNGKPYQAVLPEIREVLRSACETHNLPLAQTWVSCIQQAKDGCRHSDDNYVHCVSTVDQACHVTDPHIRGFHEACSEHHLLKGQGIVGRAFMTNQPCFSNDITSLAKTEYPLSHHARMFGLHAAVAIRLRSIDTGSTDFVLEFFLPVDCRDPEEHKKMLTSLSLIIQNICRSLRVVTDKELEEEIDLPVSEVIVPSDPRPSGIASFAEVQQTDNDVSIFPKEKARKMPSAKSSKLMPQDLNVKGVDCVGEFSTIVEGSFSSVGASKTGEKRRTKAEKAITLEVLRKYFSGSLKDAAKSLGVCSTTLKRICRQHGIKRWPSRKIKKVGHSLEKLQRVIDSVQGASSAFQINSFYTNYPELASPNLSGTSPFSTSKLIDRPRPSDVPPDGGVLSPQATASKSPSSSCSQSTSSSQCCSSKTEQHLPTWSVAGNDDPIVGDNRMLKRVRSEAELDALRQDGVDELMQRSQSHKNLSEQQKLQSFQPSLKYDGQIAQEGDARKVKVTYGDEKTRFRIQNNWKYEDLGQEIAKRFGINDMCRFDIKYLDDDSEWVLLTCDADLEECLDVCRSSRCSTIKLSLQLSRRQLERFSGSSGPA

SEQ ID NO: 59 - protein, 909 aa, Eucalyptus grandis
MGDGGVISSAATMMEAPPPDGTTTTSMDFDYMGELFLDGCWMEASADGSDFLLQSPSFSNTLFDPSFSWPALETNHNESQVAAFGSQQESHNNNMVSVVAGGDYSQQFQSETHSVEGASEGIRRWWFAPTHTPTPSPGPGPSIMEKLIRALMWIKDYNRNKDMLIQIWVPVHKEGRPILAADDLLFSLESKSLNLAKYREISVTYKFSAEESDSKELAWGLPGRVFRDKVPEWTPDVRFFKIDEYPRVDHAQEYDVRGTLAVPIFEQGSKTCLGVIEVVMTTQQINYGPELESVCKALEAVDLRSSKQLSIQNVKQACNRSYEAALPEIHEVLRSACEMHKLPLAQTWVPCVQQGKEGCRHSEDNYLLCISPVEHACYVGDPSIRSFHEACTEHHLLKGEGVAGGAFMTNQPCFSDDITSLSKKDYPMSHHARLFGLRAAVAIRLRSIYNSTDDFVLEFFLPVDCNDIEEQRKMLTSLSNIIQRVCRSLRVIREKELEEANLSVNEVIALADSGFTRDEICSEPQQKGMVASLDTEEKSSETMGRKFSEPRQQQESPILKGNLDCVRECSTSVEGNLSSPGTSKTGERRRVKAEKTITLQVLRQYFAGSLKDAAKNIGVCTTTLKRICRQHGIKRWPSRKIKKVGHSLQKLQLVIDSVQGASGAFQINSFYSNFPDLASPNLSGTGFFSTLNQSDNPNSTSTQPEHGSLSPEGASKSPSSSSSQSSISSHSCSSMSELQQQHTTNIASDKDPATVGEYSADVVLKLIRNEAKLKSLSQDRAKLLPRSLSQETLGEHPKTQYQLPLLKTSSSKVDSHRVKVTYGDEKTRFRMLKNWVYEDLLQEIGRKFNVSDMSKFDVKYLDDDCEWILLTCDADLEECIDVCQSSESGTIKLSLQPSSHSVRSSLEFR

SEQ ID NO: 60 - protein, 583 aa, Glycine max
MEYGGFGSLSECEEELIEELLVQGCWVETSGRSEEMPMGKTWWIGPKANHASVKERLEAAMGYLREYTNNNIQIWVPLRRSAGQELGTDESDTIAFERNRNVKLRLFRSQEGCVGVPVLERGSGTCLGVLEIVMEDEVVSEMMEVVRCVCKAQKVPLALAWAPCVQQKQAKTSSGRSLATAKPCFATDITAFSNAEYPLSHHASIFDLHAAVAIPLTTFSSSFHFVLEFFLPLDCPDHNHFLNSLSLLLHQACRSTFHLSLIHDHHLDFEFLPTESPSQASWIAHMMEAQSQHIKGVCLSLEEEPKEEFKVTTTHYCNWDSTATSTYQAHDQVVFGEESHTHTFGGKRGRKPGEKRRTKAEKTISLPVLRQYFAGSLKDAAKSIGVCPTTLKRICRQHGITRWPSRKIKKVGHSLKKLQLVIDSVQGAEGAIQIGSFYNSFPELSSQSSKSNNNNNSSSPTAAAAAAQSPQQPLRVKATFADEKIRFSLQPHWGFTELQLEIARRFNLNDVSNGYLVLKYLDDDGEWVVLACDGDLEECKDLHTTSQSRTIRLALFQASPLNNLPNTYTFAAATPSSSLAVSL

SEQ ID NO: 61 - protein, 710 aa, Glycine max
MEYGAFGSLSECEEDLIEELLEKGCWVETNGSSEAQYDIEQELAMPMGKTTWWIGPKGPVSGSSSSVKERLVVAVGYLREYTKNNNAANVLIQIWVPIRRMTGLLAIGLGPDESVSVAFPFPTNMNMNMKSNVNIRFFRSHEYPRIPYEYGSLALPVFERGSGTCLGVLQIVMPAARWDTINYLPQLDNNNNNNAFQGMIPGGVVKVFDEDEVYEASVNEMMEVVRCVCKTQNVPLALTWAPCVQQLCVDCGHSRDENNYVSIVDRACFVGDGQPQLLGFQEACSQHHLFRGQGIVGTAFTTAKPCFAMDITAFTKAEYPLSHHANIFDLHSAVAIPLRTSSYPHFDFVLEFFLPKHCPDHNLFLNSLSILLQQACPTFHLSAPIHDDVFTSLPSESQSQQASWIAHMIDAQSQHKDNGKGVCLSLDFLEEEPKEEFKVTTTHCNWDTTATSTYHSHDHVVFSDFGEESQSQSQSQTHTFGVKRGRKPGEKRRTKAEKTISLPVLRQYFAGSLKDAAKSIGVCPTTLKRICRQHGITRWPSRKIKKVGHSLKKLQLVIDSVQGAEGAIQIGSFYNSFPELSSRASQSSSPAAQSPPHVPQQPLRVKATFADEKIRFSLQPLWGFTELQLEISRRFNLSDVSNANNVVLKYLDDDGEWVVLACDGDLEECKDLHTTSQSRTIRLALFQASPLNNQPNSYTFANTTSTPSSS

SEQ ID NO: 62 - protein, 908 aa, Glycine max
MGDSGVTSSAATMMEAPPPDGTTTTATSMDFDYMGEFFLDGCWLEASADVSDFLLQSPSFSNPLFDPSLSWPALETNHNKSQDAAFGTQQESHNNIVSVVAGGGYSQQFQSETHSVEGVSEGVRRWWFAPSPIPSPGPGPSIMEKLIRALMWIKDYNRNKDMLIQIWVPIHKEGRPILAADDLLFSLESKSLNLAKYREISVTYEFSAEESDSKELARGLPGRVFRYKVPEWTPDVRFFRSDEYPRVDHAQEYDVRGTVAVPIFEQGSKTCLGVIEVVMTTQQINYGPELESVCKALEAVDLRSSKQLSIQNVKQACNRTYEAALPEIYEVLRSACEMHRLPLAQTWVPCVQQGKEGCRHSEDNYLLCISPVEHACYVGDPSIRSFHEACTEHHLLKGEGVAGGAFMTNQPCFSDDITSLSKKDYPLSHYARLFGLHAAVAIRLRSIYNSTDDFVLEFFLPVDCNDSEEQRKMLTALSIIIQRVCRSLRVIRDKELEEANLSVDEVIALADSGFARNAIFSEPQYKGMVASLDAEEKSSETMGRKFSDLRQQQESPILKGNLDCVKECSTSVEGNLSSLGTNKTGERRRAKAEKTITLQVLRQYFAGSLKDAAKNIGVCTTTLKRICRQHGIKRWPSRKIKKVGHSLQKLQLVINSVQGASGAFQIGSFYSNFPDLASPNLSGTGFFSTLNQSDYPNSTSTQPDHGSLSPEGASKSPSSSCSQSSISSHSCSSMSELQQHRTANGAGNKVSTTVSEDSAGVVLKRISSEAELKSLSQDRAKLLPRSQSQETLGEHPKTQYQQPLLKTSSSKVDSHRVKVAYGDEKTRFRMPKSWGYEDLLQEIARRFNVSDMSKFDVKYLDDDCEWVLLTCDADLEECIDVCQSSESGTIKLSLQPSSHSMRSSLEFR

SEQ ID NO: 63 - protein, 785 aa, Glycine max
MEYGGLVQNSAYGSFSEIFGPETDFIDELFVEGCWVETRVGSYLNCGGEANSSKPNTMASMETSAQIIFQEESLSDPEISLMVGKRWWIGPRENPGPSSSVKERLVIAVGYLKEYAKNSNLLIQVWVPERRRSARAQPQDNYPYAALLNTTSAFQFQEDWVHDQWTPNIRFFRSHEYPRHLRRPGSLALPVFESGSAMCLGVVEILMPNNPDLHALQSVDFTSSTCHQNFIPPAAVTAKGFDELYQSALNEIVEVLTCVCKAHNLPLALTWAPCIQQGKSGCGHSNDENYVSIVDPASFVADVEVLGFLEACSECHLLGGQGVVGTAFTTTKPCFANDITAFSKAEYPLAHHANMFGLHAAVAIPLLSDSADFVLEFFLPKDCHDTQEQKQMLNSLSMLVQQACRSLHVVMGKEEEEEEEEEELIALPPVGKEMESSSSSSWIAHMMEAQQKGKGVSVSLEYLQEPKQEFRVTTNCNEQVSVGVESGGGEESYTAAFGGRRGARKSAGDKRRTKAEKTISLPVLRQYFAGSLKDAAKSIGVCPTTLKRICRQHGITRWPSRKIKKVGHSLRKLQLVIDSVQGAEGAIQIGSFYTSFPELSSANGVSESSNINNKFFSEYNQGATTFKSPTSPCSQTTILISENQQPLVLGASIQVQEEAKHFAHHLEPLPPAPLPQSSTSLWNTAGTFRVKATFGDEKIRFSLQPNWGFRDLQMEIARRFNLNEISNIQLKYLDDAREWVLLTCDADLDECKDINTSSQSRTIRLFLFQASPLNHANAFRGTSPS

SEQ ID NO: 64 - protein, 910 aa, Glycine max
MMGDGGVISSAATMMEAPPPDGTTTTSMDFDYMGELFLDGCWMEASADGSDFLLQSPSFSNTLFDPSFSWPALETNHNESQVAAFGSQQESHNNNMVSVVAGGDYSQQFQSETHSVEGASEGIRRWWFAPTHTPTPSPGPGPSIMEKLIRALMWIKDYNRNKDMLIQIWVPVHKEGRPILAADDLLFSLESKSLNLAKYREISVTYKFSAEESDSKELAWGLPGRVFRDKVPEWTPDVRFFKIDEYPRVDHAQEYDVRGTLAVPIFEQGSKTCLGVIEVVMTTQQINYGPELESVCKALEAVDLRSSKQLSIQNVKQACNRSYEAALPEIHEVLRSACEMHKLPLAQTWVPCVQQGKEGCRHSEDNYLLCISPVEHACYVGDPSIRSFHEACTEHHLLKGEGVAGGAFMTNQPCFSDDITSLSKKDYPMSHHARLFGLRAAVAIRLRSIYNSTDDFVLEFFLPVDCNDIEEQRKMLTSLSNIIQRVCRSLRVIREKELEEANLSVNEVIALADSGFTRDEICSEPQQKGMVASLDTEEKSSETMGRKFSEPRQQQESPILKGNLDCVRECSTSVEGNLSSPGTSKTGERRRVKAEKTITLQVLRQYFAGSLKDAAKNIGVCTTTLKRICRQHGIKRWPSRKIKKVGHSLQKLQLVIDSVQGASGAFQINSFYSNFPDLASPNLSGTGFFSTLNQSDNPNSTSTQPEHGSLSPEGASKSPSSSSSQSSISSHSCSSMSELQQQHTTNIASDKDPATVGEYSADVVLKLIRNEAKLKSLSQDRAKLLPRSLSQETLGEHPKTQYQLPLLKTSSSKVDSHRVKVTYGDEKTRFRMLKNWVYEDLLQEIGRKFNVSDMSKFDVKYLDDDCEWILLTCDADLEECIDVCQSSESGTIKLSLQPSSHSVRSSLEFR

SEQ ID NO: 65 - protein, 792 aa, Glycine max
MEYGGLVQNAYGSYGSFSDILGPETDFIDELFVEGCWLETRVGSYLNCGTEANSSKSNTMRSMESTQIIFQQEESLPDPEISLMVGKRWWIGPRENPGPSSSVKERLVIAVGYLKEYAKNSNLPIQVWVPERRSARAQPQDNIYPYAAALLNGDAAAFQIQEDWVHVNDQYWTPNVRFFRSHEYPRHLRTPGSLALPVFERGTAMCLGVVEILMPNNPPDLQCTVDFTSSTSSHHHNFIPPAVTVKGFDELYQSALNGIVQVLTCVCKAHNLPLALTWAPCIQQAGKSGCGHSNDEMNYVSTVYAASFVADVELMGFLEACSECHLLGGQGVVGTAFTTTKPCFANDITSFSKAEYPLAHHANMFGLHAALGIPLRSASADFVLEFFLPKDCHDTQDQKQLLNSLFMLVQQACRSLHLVMEEEEELIALPSVVGKEMESSSWIAHMMEAQQKGKGVSVSLEYLQEPKQEFKVTTNCSNTNEQVSVGVESTAAFCGRRVGRKSAGDKRRTKAEKTISLPVLRQYFAGSLKDAAKSIGVCPTTLKRICRQHGITRWPSRKIKKVGHSLRKLQLVIDSVQGAEGAIQIGSFYTSFPELSSAANGVSESSNINNNNNDNSKFFSEYNQGQGATTFKSPTTSPCSQTTIVMSESQPLGLGASVQVVQEEAKHFAHQHLESLPPLPQSSTSVWNMGTFRVKATFGDEKIRFSLQPNWGFRDLQKEISRRFNLNEISNIQLKYLDDAREWVLLTCDADLEECKGINTSSQSQSRTIRLFLFHASPLNHANAFPGTSPSS

SEQ ID NO: 66 - protein, 909 aa, Glycine max
MMGDGGVISSAATMMEAPPPDGTTTTSMDFDYMGELFLDGCWMEASADGSDFLLQSPSFSNTLFDPSFSWPALETNHNESQVAAFGSQQESHNNNMVSVVAGGDYSQQFQSETHSVEGASEGIRRWWFAPTHTPTPSPGPGPSIMEKLIRALMWIKDYNRNKDMLIQIWVPVHKEGRPILAADDLLFSLESKSLNLAKYREISVTYKFSAEESDSKELAWGLPGRVFRDKVPEWTPDVRFFKIDEYPRVDHAQEYDVRGTLAVPIFEQGSKTCLGVIEVVMTTQQINYGPELESVCKALEAVDLRSSKQLSIQNVKACNRSYEAALPEIHEVLRSACEMHKLPLAQTWVPCVQQGKEGCRHSEDNYLLCISPVEHACYVGDPSIRSFHEACTEHHLLKGEGVAGGAFMTNQPCFSDDITSLSKKDYPMSHHARLFGLRAAVAIRLRSIYNSTDDFVLEFFLPVDCNDIEEQRKMLTSLSNIIQRVCRSLRVIREKELEEANLSVNEVIALADSGFTRDEICSEPQQKGMVASLDTEEKSSETMGRKFSEPRQQQESPILKGNLDCVRECSTSVEGNLSSPGTSKTGERRRVKAEKTITLQVLRQYFAGSLKDAAKNIGVCTTTLKRICRQHGIKRWPSRKIKKVGHSLQKLQLVIDSVQGASGAFQINSFYSNFPDLASPNLSGTGFFSTLNQSDNPNSTSTQPEHGSLSPEGASKSPSSSSSQSSISSHSCSSMSELQQQHTTNIASDKDPATVGEYSADVVLKLIRNEAKLKSLSQDRAKLLPRSLSQETLGEHPKTQYQLPLLKTSSSKVDSHRVKVTYGDEKTRFRMLKNWVYEDLLQEIGRKFNVSDMSKFDVKYLDDDCEWILLTCDADLEECIDVCQSSESGTIKLSLQPSSHSVRSSLEFR

SEQ ID NO: 67 - protein, 907 aa, Glycine max
MGDSGVTSSAATMMEAPPPDGTTTTATSMDFDYMGEFFLDGCWLEASADVSDFLLQSPSFSNPLFDPSLSWPALETNHNKSQDAAFGTQQESHNNIVSVVAGGGYSQQFQSETHSVEGVSEGVRRWWFAPSPIPSPGPGPSIMEKLIRALMWIKDYNRNKDMLIQIWVPIHKEGRPILAADDLLFSLESKSLNLAKYREISVTYEFSAEESDSKELARGLPGRVFRYKVPEWTPDVRFFRSDEYPRVDHAQEYDVRGTVAVPIFEQGSKTCLGVIEVVMTTQQINYGPELESVCKALEAVDLRSSKQLSIQNVKACNRTYEAALPEIYEVLRSACEMHRLPLAQTWVPCVQQGKEGCRHSEDNYLLCISPVEHACYVGDPSIRSFHEACTEHHLLKGEGVAGGAFMTNQPCFSDDITSLSKKDYPLSHYARLFGLHAAVAIRLRSIYNSTDDFVLEFFLPVDCNDSEEQRKMLTALSIIIQRVCRSLRVIRDKELEEANLSVDEVIALADSGFARNAIFSEPQYKGMVASLDAEEKSSETMGRKFSDLRQQQESPILKGNLDCVKECSTSVEGNLSSLGTNKTGERRRAKAEKTITLQVLRQYFAGSLKDAAKNIGVCTTTLKRICRQHGIKRWPSRKIKKVGHSLQKLQLVINSVQGASGAFQIGSFYSNFPDLASPNLSGTGFFSTLNQSDYPNSTSTQPDHGSLSPEGASKSPSSSCSQSSISSHSCSSMSELQQHRTANGAGNKVSTTVSEDSAGVVLKRISSEAELKSLSQDRAKLLPRSQSQETLGEHPKTQYQQPLLKTSSSKVDSHRVKVAYGDEKTRFRMPKSWGYEDLLQEIARRFNVSDMSKFDVKYLDDDCEWVLLTCDADLEECIDVCQSSESGTIKLSLQPSSHSMRSSLEFR

SEQ ID NO: 68 - protein, 581 aa, Glycine max
MEYGGLVQNAYGSYGSFSDILGPETDFIDELFVEGCWLETRVGSYLNCGTEANSSKSNTMRSMESTQIIFQQEESLPDPEISLMVGKRWWIGPRENPGPSSSVKERLVIAVGYLKEYAKNSNLPIQVWVPERRSARAQPQDNIYPYAAALLNGDAAAFQIQEDWVHVNDQYWTPNVRFFRSHEYPRHLRTPGSLALPVFERGTAMCLGVVEILMPNNPPDLQCTVDFTSSTSSHHHNFIPPAVTVKGFDELYQSALNGIVQVLTCVCKAHNLPLALTWAPCIQQAGKSGCGHSNDEMNYVSTVYAASFVADVELMGFLEACSECHLLGGQGVVGTAFTTTKPCFANDITSFSKAEYPLAHHANMFGLHAALGIPLRSASADFVLEFFLPKDCHDTQDQKQLLNSLFMLVQQACRSLHLVMEEEEELIALPSVVGKEMESSSWIAHMMEAQQKGKGVSVSLEYLQEPKQEFKVTTNCSNTNEQVSVGVESTAAFCGRRVGRKSAGDKRRTKAEKTISLPVLRQYFAGSLKDAAKSIGVCPTTLKRICRQHGITRWPSRKIKKVKELLHSNPQQLRLAVRPLL

SEQ ID NO: 69 - protein, 594 aa, Glycine max
MEYGGFGSLSECEEELIEELLVQGCWVETSGRSEEMPMGKTWWIGPKANHASVKERLEAAMGYLREYTNNNIQIWVPLRRSAGQELGTDESDTIAFERNRNVKLRLFRSQEGCVGVPVLERGSGTCLGVLEIVMEDEVVSEMMEVVRCVCKAQKVPLALAWAPCVQQKQAKYCGHSRDESYVTSSGRSLATAKPCFATDITAFSNAEYPLSHHASIFDLHAAVAIPLTTFSSSFHFVLEFFLPLDCPDHNHFLNSLSLLLHQACRSTFHLSLIHDHHLDFEFLPTESPSQASWIAHMMEAQSQHIKGVCLSLEEEPKEEFKVTTTHYCNWDSTATSTYQAHDQVVFGEESHTHTFGGKRGRKPGEKRRTKAEKTISLPVLRQYFAGSLKDAAKSIGVCPTTLKRICRQHGITRWPSRKIKKVGHSLKKLQLVIDSVQGAEGAIQIGSFYNSFPELSSQSSKSNNNNNSSSPTAAAAAAQSPQQPLRVKATFADEKIRFSLQPHWGFTELQLEIARRFNLNDVSNGYLVLKYLDDDGEWVVLACDGDLEECKDLHTTSQSRTIRLALFQASPLNNLPNTYTFAAATPSSSLAVSL

SEQ ID NO: 70 - protein, 709 aa, Glycine soja
MVGKRWWIGPRENPGPSSSVKERLVIAVGYLKEYAKNSNLPIQVWVPERRSARAQPQDNIYPYAAALLNGDAAAFQIQEDWVHVNDQYWTPNVRFFRSHEYPRHLRTPGSLALPVFERGTAMCLGVVEILMPNNPPDLQCTVDFTSSTSSHHHNFIPPAVTVKGFDELYQSALNGIVQVLTCVCKAHNLPLALTWAPCIQQAGKSGCGHSNDEMNYVSTVYAASFVADVELLGFLEACSECHLLGGQGVVGTAFTTTKPCFANDITSFSKAEYPLAHHANMFGLHAALGIPLRSASADFVLEFFLPKDCHDTQDQKQLLNSLFMLVQQACRSLHLVMEEEEELIALPSVVGKEMESSSWIAHMMEAQQKGKGVSVSLEYLQEPKQEFKVTTNCSNTNEQVSVGVESTAAFCGRRVGRKSAGDKRRTKAEKTISLPVLRQYFAGSLKDAAKSIGVCPTTLKRICRQHGITRWPSRKIKKVGHSLRKLQLVIDSVQGAEGAIQIGSFYTSFPELSSAANGVSESSNINNNNNDNSKFFSEYNQGQGATTFKSPTTSPCSQTTIVMSESQPLGLGASVQVVQEEAKHLAHQHLESLPPLPQSSTSVWNMGTFRVKATFGDEKIRFSLQPNWGFRDLQKEISRRFNLNEISNIQLKYLDDAREWVLLTCDADLEECKGINTSSQSQSRTIRLFLFHASPLNHANAFPGTSPSS

SEQ ID NO: 71 - protein, 910 aa, Glycine soja
MMGDGGVTSSAATMMEAPPPDGTTTTSMDFDYMGELFLDGCWMEASADGSDFLLQSPSFSNTLFDPSFSWPALETNHNESQVAAFGSQQESHNNNMVSVVAGGDYSQQFQSETHSVEGASEGIRRWWFAPTHTPTPSPGPGPSIMEKLIRALMWIKDYNRNKDMLIQIWVPVHKEGRPILAADDLLFSLESKSLNLAKYREISVTYKFSAEESDSKELAWGLPGRVFRDKVPEWTPDVRFFKIDEYPRVDHAQEYDVRGTLAVPIFEQGSKTCLGVIEVVMTTQQINYGPELESVCKALEAVDLRSSKQLSIQNVKQACNRSYEAALPEIHEVLRSACEMHKLPLAQTWVPCVQQGKEGCRHSEDNYLLCISPVEHACYVGDPSIRSFHEACTEHHLLKGEGVAGGAFMTNQPCFSDDITSLSKKDYPMSHHARLFGLRAAVAIRLRSIYNSTDDFVLEFFLPIDCNDIEEQRKMLTSLSNIIQRVCRSLRVIREKELEEANLSVNEVIALADSGFTRDEICSEPQQKGMVASLDTEEKSRETMGRKFSEPRQQQESPILKGNLDCVRECSTSVEGNLSSPGTSKTGERRRVKAEKTITLQVLRQYFAGSLKDAAKNIGVCTTTLKRICRQHGIKRWPSRKIKKVGHSLQKLQLVIDSVQGASGAFQIDSFYSNFPDLASPNLSGTGFFSTLNQSDNPNSTSTQPEHGSLSPEGASKSPSSSSSQSSISSHSCSSMSELQQQHTTNIASDKDPATVGEDSADVVLKLIRNEAKLKSLSQDRAKLLPRSLSQETLGEHPKTQYQLPLLKTSSSKVDSHRVKVTYGDEKTRFRMLKNWVYEDLLQEIGRKFNVSDMSKFDVKYLDDDCEWILLTCDADLEECIDVCQSSESGTIKLSLQPSSHSVRSSLEFR

SEQ ID NO: 72 - protein, 666 aa, Glycine soja
MPMGKTTWWIGPKGPVSGSSSSVKERLVVAVGYLREYTKNNNAANVLIQIWVPIRRMTGLLAIGLGPDESVSVAFPFPTNMNMNMKSNVNIRFFRSHEYPRIPYEYGSLALPVFERGSGTCLGVLQIVMPAARWDTINYLPQLDNNNNNNAFQGMIPGGVVKVFDEDEVYEASVNEMMEVVRCVCKTQNVPLALTWAPCVQQLCVDCGHSRDENNYVSIVDRACFVGDGQPQLLGFQEACSQHHLFRGQGIVGTAFTTAKPCFAMDITAFTKAEYPLSHHANIFDLHSAVAIPLRTSSYPHFDFVLEFFLPKHCPDHNLFLNSLSILLQQACPTFHLSAPIHDDVFTSLPSESQSQQASWIAHMIDAQSQHKDNGKGVCLSLDFLEEEPKEEFKVTTTHCNWDTTATSTYHSHDHVVFSDFGEESQSQSQSQTHTFGVKRGRKPGEKRRTKAEKTISLPVLRQYFAGSLKDAAKSIGVCPTTLKRICRQHGITRWPSRKIKKVGHSLKKLQLVIDSVQGAEGAIQIGSFYNSFPELSSRASQSSSPAAQSPPHVPQQPLRVKATFADEKIRFSLQPLWGFTELQLEISRRFNLSDVSNANNVVLKYLDDDGEWVVLACDGDLEECKDLHTTSQSRTIRLALFQASPLNNQPNSYTFANTTSTPSSS

SEQ ID NO: 73 - protein, 704 aa, Glycine soja
MVGKRWWIGPRENPGPSSSVKERLVIAVGYLKEYAKNSNLLIQVWVPERRRSARAQPQDNYPYAALLNTTSAFQFQEDWVHDQWTPNIRFFRSHEYPRHLRRPGSLALPVFESGSAMCLGVVEILMPNNPDLHALQSVDFTSSTCHQNFIPPAAVTAKGFDELYQSALNEIVEVLTCVCKAHNLPLALTWAPCIQQGKSGCGHSNDENYVSMVDPASFVADVEVLGFLEACSECHLLGGQGVVGTAFTTTKPCFANDITAFSKAEYPLAHHANMFGLHAAVAIPLLSDSADFVLEFFLPKDCHDTQEQKQMLNSLSMLVQQACRSLHVVMGKEEEEEEEEEELIALPPVGKEMESSSSSSWIAHMMEAQQKGKGVSVSLEYLQEPKQEFRVTTNCNEQVSVGVESGGGEESYTAAFGGRRGARKSAGDKRRTKAEKTISLPVLRQYFAGSLKDAAKSIGVCPTTLKRICRQHGITRWPSRKIKKVGHSLRKLQLVIDSVQGAEGAIQIGSFYTSFPELSSANGVSESSNINNKFFSEYNQGATTFKSPTSPCSQTTILISENQQPLVLGASIQVQEEAKHFAHHLEPLPPAPLPQSSTSLWNTAGTFRVKATFGDEKIRFSLQPNWGFRDLQMEIARRFNLNEISNIQLKYLDDAREWVLLTCDADLDECKDINTSSQSRTIRLFLFQASPLNHANAFRGTSPS

SEQ ID NO: 74 - protein, 874 aa, Glycine soja
MGEFFLDGCWLEASADVSDFLLQSPSFSNPLFDPSLSWPALETNHNKSQDAAFGTQQESHNNIVSVVAGGGYSQQFQSETHSVEGVSEGVRRWWFAPSPIPSPGPGPSIMEKLIRALMWIKDYNRNKDMLIQIWVPIHKEGRPILAADDLLFSLESKSLNLAKYREISVTYEFSAEESDSKELARGLPGRVFRYKVPEWTPDVRFFRSDEYPRVDHAQEYDVRGTVAVPIFEQGSKTCLGVIEVVMTTQQINYGPELESVCKALEAVDLRSSKQLSIQNVKACNRTYEAALPEIYEVLRSACEMHRLPLAQTWVPCVQQGKEGCRHSEDNYLLCISPVEHACYVGDPSIRSFHEACTEHHLLKGEGVAGGAFMTNQPCFSDDITSLSKKDYPLSHYARLFGLHAAVAIRLRSIYNSTDDFVLEFFLPVDCNDSEEQRKMLTALSIIIQRVCRSLRVIRDKELEEANLSVDEVIALADSGFARNAIFSEPQYKGMVASLDAEEKSSETMGRKFSDLRQQQESPILKGNLDCVKECSTSVEGNLSSLGTNKTGERRRAKAEKTITLQVLRQYFAGSLKDAAKNIGVCTTTLKRICRQHGIKRWPSRKIKKVGHSLQKLQLVINSVQGASGAFQIGSFYSNFPDLASPNLSGTGFFSTLNQSDYPNSTSTQPDHGSLSPEGASKSPSSSCSQSSISSHSCSSMSELQQHRTANGAGNKVSTTVSEDSAGVVLKRISSEAELKSLSQDRAKLLPRSQSQETLGEHPKTQYQQPLLKTSSSKVDSHRVKVAYGDEKTRFRMPKSWGYEDLLQEIARRFNVSDMSKFDVKYLDDDCEWVLLTCDADLEECIDVCQSSESGTIKLSLQPSSHSMRSSLEFR

SEQ ID NO: 75 - protein, 591 aa, Glycine soja
MPMGKTWWIGPKANHASVKERLEAAMGYLREYTNNNIQIWVPLRRSAGQELGTDESDTIAFERNRNVKLRLFRSQEGCVGVPVLERGSGTCLGVLEIVMEDEVVSEMMEVVRCVCKAQKVPLALAWAPCVQQKQAKYCGHSRDESYVSTVERACFVGEENPQLLGFQEACSQHHLFRGQGVVGTALATAKPCFATDITAFSNAEYPLSHHASIFDLHAAVAIPLTTFSSSFHFVLEFFLPLDCPDHNHFLNSLSLLLHQACRSTFHLSLIHDHHLDFEFLPTESPSQASWIAHMMEAQSQHIKGVCLSLEEEPKEEFKVTTTHYCNWDSTATSTYQAHDQVVFGEESHTHTFGGKRGRKPGEKRRTKAEKTISLPVLRQYFAGSLKDAAKSIGVCPTTLKRICRQHGITRWPSRKIKKVGHSLKKLQLVIDSVQGAEGAIQIGSFYNSFPELSSQSSKSNNNNNSSSPTAAAAAAQSPQQPLRVKATFADEKIRFSLQPHWGFTELQLEIARRFNLNDVSNGYLVLKYLDDDGEWVVLACDGDLEECKDLHTTSQSRTIRLALFQASPLNNLPNTYTFAAATPSSSLAVSL

SEQ ID NO: 76 - protein, 841 aa, Hordeum vulgare
  REGION 1..841: note = subsp. vulgare
MEGGDAQPGISVGRALSSEGDLDLLEQLLSGDNAWLEVAPNTSRSPNFFASPSTFLSDATTTTTMPAGASSALWIQPPSSTVRQRFEQALDHIKQMQRDAGMLVQLWVPQKNSDGKLVLTTSGQPFTLDNTSDRLIQFRDVSTHYHFSADAGSEASPVGLPGRVFIGKLPEWSPDVRLFTSYEYPRVKYAQDLDVHGTMGLPVFEKGSYSCLGVMELIMTRQKLNFTSEINNICNALQAVNLRSTEVSSTPRATKFNSASYRDALPEILEVLRAACVTHNLPLAQTWVTCAQQGKGGSRHTDENYPYCISTIDTACYVNDPQMQNFHDSCSDHHLLRGQGVAGKAFETNQPCFLPDIGSSAKEHYPLSHHAKIFNLKGAVAIRLRCTRTGTADFVLEFFLPTNCEALEEQKAVLDSLSGTMRNTCRTLRVVTDKEMGDEAMLDRNELNTFGPQGKNKVEELSFGDQATEHREEASWTSLAGTSKESDLAELSMHGMLSPEGQGLSLAGAQTSAQGSKGKRRTKTEKTVSLPVLRQYFAGSLKDAARSLGVCPTTLKRICRQHGINRWPSRKIKKVDHSLRKLQQIIDSVHGGETAFQLNTLYKDLTNTSVSSDNNLSGSITVPPHKQSNLTDFERHGHHRLSNNVPSTSHSHSSCSQSSDSSPSSCSGGSTKYPPQAGVDLLMSGNPVNHSPVQTLQTENASIIGHFPVQEAPDLLHNLNQKALGGQHSSRSPSPPKQNADTGMRIKAAFGSEKVRFRLKPECSFQELKQEMARRLSIVDISFLIVKYLDDDLEWVLMTCDADLQECLHVYKLANLQTVKISVHLAPIPEARVTVGRTGLS

SEQ ID NO: 77 - protein, 503 aa, Hordeum vulgare
  REGION 1..503: note = subsp. vulgare
MERRTASPEGADIYLMDLDTVQLLLPPDDGDGDSGSPELAIEASSSYPCIDQDLDQHLANYSLVLPSTPELAIDGSSSPIIDWAALDKIPLYIGSCLEVATTIIPSDAETTMASEGAMSGSDLNEPLHRDNTCLQAATIASSPYASPRTIPSDATTNHVFPRGYFAQKEGEAARLNLDSLVIKLSSMMERELKSFCSKIQDTIQHVVESTMKTYFLQKKKRTITHVSSIPRTKFNINSYEEAIREILQVLRAACVIHNLPLAQTWATCAQQGKQCKHHSYENCRYCISTIDAACYVNDPRIQIFHEACSEHHLLPGQGVAGKAFATNQSCFRPDVGSSTEQEYPLSHHAKIFKLKGVMAIRLRSTRTGTADFVLEFFLPTDCEVENEQNALMNSLSKTVQCLCPTLRMVTNKEMEDDPVWEMNEINSLGLQKNNKVKKRKSMARRSPVWKSFTEVMDGDTVKAKCNHCGIDLCCDSKTHGTSSLANHLKICKLNPNNRITGPM

SEQ ID NO: 78 - skipped

SEQ ID NO: 79 - protein, 924 aa, Humulus lupulus
MEEGVLSPATMLGAQSEYPMDLDFMDELFLEGCWLETRDVSEYLNQTPSSNPLFDPLFWPTLETTGDLNANPSQKNNQEERQKLLFNETLGASIFRALPPSQTINNVANNSGVSEAFITEDDEMRRTSWTGAKETQGPSSCVIEKLCRALMYIKDVIRDNDILVQIWVPVDREGRRVLTTRDLPFALDDSCPKLAQYRDISVEFHFPAEEDSKGSIMGLPGRVFSGKVPEWTPDVRYFRKDEYPRLKHAHQFDVRGTLALPIFEQGSRICLGVVEIIMTTQKIKYRPELESICKALEAVNLKSSEVLSTQNVRVFNKYYQAALPEIQQVLKSACDTHRLPLAQTWVPCIYQAKEGCRHSDENYVQCVSTVDHACYVADPHVQGFHEACSEHHLFRGQGVVGGAFMTNQPCFSADITSYPKTEYPLSHHAMMFELHAAVAIRLRSTHTGTADFVLEFFLPKDCIDPEEQKKMLTSLSLIIQQCCRTLRVVTDKEIDDERDFQVSEVLVPSNDRPDRVICFQEVQQNDNDLSLFPVEKPREISDRRHSKLSQNQRDSSLKPSDECVEECSTVGEGTFSSLGGGKTGERRRTKAEKTITLQVLRQYFAGSLKDAAKSIGVCSTTLKRICRQHGIKRWPSRKIKKVGHSLQKLQLVIDSVQGASGAFQIDSFYSNFPELASPNVSGTSPFSTSKANDHPTPSSLQQPAEGSGGMFSAQATTTAAAATSKSSSTYSQSSSSSQCCSSRSQQHPQTWSNMVTSSEDANGGENSGDDVVLKRVRSEAELNACHEVVNKQLPRSQSHISLMEHRKSLKSGFPPSSLKNERRLPQQEGELQRVKVTYGEEKTRFRIPSNWGFMDLQQEVGRRFGIQDMATFTLKYLDDDSEWVLLTCDADLEECFEVWPASQNSTIKLSLQLSRGFIGGNDPL

SEQ ID NO: 80 - protein, 608 aa, Jatropha curcas
MSYEAALSEIHEVLRSACETHKLPLGQIWVPCIQQGKRGCRHSDENYYRCVSTVDHACYVRETGMQAFHEACSEHHLLKGQGVAGEAFLTNQPCFSSDITSYRKTEYPLSHHARMFGLHAAVAIRLRSVHTGKADFALEFFLPVDCTDPEKQKDMLTSLSTIIQQVCQSLRVVTDRELEAETGPVSEVVLPSYGRPRREDMLRVMHYSESYAGDNSSLTASLTGIQQSGSVVLSYEKENQKVPIDEKSMEYRISREDYNLKRSIECGVDSEVAEGSLSSVCMGKTAERKRSKAEKAITLQVLRQYFAGSLKDAAKSIGVCPTTLKRICRQHGIKRWPSRKIKKVGHSLQKLQLVIDSVQGASGALQIGSFYTNFPELASQKLSSSPFSASKQSDHLEQSSIQTDGGTFSSQVAAPKSPSSSCSQSSSSSHSCSSGLQQNPSVFSIPTSEDHIPGENSSNGVLKRVRSDAELHASSQEEQNMLPRSQSHIPLREQPNSGNLPPLPKSSSRISHEGDAQRIKVTYGNEKIRFRMPYNWKRKDLLQEIARRFFIDDINRYDLKYLDDDNEWVLLTCDDDLEECIDVCQSSENSTIKLSLQISHLMDGFSRS

SEQ ID NO: 81 - protein, 800 aa, Jatropha curcas
MDLDFIDKPFAHGSWLRTTDKVNFLESDPFISSVQYLDSYHQFSQKEMENLFDNPTPVYPGIGKCVVETDTCLGQSQGGESRTRKCLIEPYCSVKDRLMLAIDYLKEYVEDSDALIQIWVPTKIAGQNVLTTTDQPYSLNPSCLSLASYRNVSKAFHLTAEEDSKESAGLPGPVFLEKFPEWTPDVRFFRNDECPRKYYAELYNISGCLALPVFEQESGTCLAVVEIVTTTQKINYHLELEIVCKALEAVDLKSSQDFFPFCIKTCNEFYQIAIPEISKILKSVCETNNLPLALTWALCNRQGKNEYKQVSGKYDYYISTVDSACYMADSDLFGFYKACSTQYLFLDQGIVGKALTRNKQLFATDVTSFSKTSYPLSHHARMFNLRAALAIPLANIYTGSIEFVLEIFLPRDCQDIEEQKHMWDFLPIVIQHSCRNFHVIMDKEKENFAFVSWECLKEEPEEAFKVISHWDNNESEFSEFEQLQESSALKFGVTDESKENSSVGEKRQTKAEKTISLQILRQYFAGSLKDAAKSIGVCPTTLKRICRQHGINRWPSRKIKKGNHSLKKLQLVVNSIRGAEGLIRIDSFYNTFPGLNSQGNDHFPSFKTNNNSQKLNSQPDSGLLSLKVADSNSQSPSGSQNSGSSICCSTKAKQLTSTTTNGLNTAFSLAVEVPVVTLNRSCSKAELLSPNHDKIQETIPKVTGQSFRDGMIFRVKATFGLENIRFSFQPNWAFKDLQQEIAKRFKIYDFSKIDLKYLDIDQESVLLTCDDDLDECLDLLRFSQTNTLKISLYQSSQPKI

SEQ ID NO: 82 - protein, 946 aa, Jatropha curcas
MDDGAFNPNSRPRTFSGTAMDLDFIDELLDDGCWLETTDGFNFLQPGLSNSGVPSDPSQYSPYLESSSSLASTNLHQVIHQEAAENNLPGNPPCNNTRGKELTESESQNQSSLKITSSLVQPEPSPIEGSELGTRLWIAPMAGVQSSSSVKQRLIHAIGKLKECAKDMEVLVQIWVPTKKEGKCVLTTIGQPSFHSLKNESLASYRNVSEAYNFPVEGDSKESLGLPGRVFLGKLPESTPDVRFFRSDEYPRKSYAKQYNIRGSLAVPVLERGTGNCLGVVEVITTSQYINYRPELETICKALEAVDLRSSQHFCPPSVKACKEFCQAAVPEISEILGSVCKTHKLPLALTWARCFQQGKGGCRHFDENFAHSISTVDSACFVADTEFLAFHAACSEQYLFLGQGIVGKAFMMNKQCFATDITSFSKTDYPLSHHAKVLDLHAAVAIPLRSTYAGSADFVLELFLPKDCRDGEEQKRIWDLLPIAIQQSCKSLHVVMDKEQEEDIRWQMAVNSNGRYNKQENHNFASSSLQQHYPESSSWITQMMEAQQKGKSVCVSWDTENKPKQEFKVATNYDDTPEDLYSKQVFAESGQLHQNSGNKNSIEVSKNSSFAGQHSSGSKKGGEKRRTKAEKTISLQVLRQYFAGSLKDAAKSIGVCPTTLKRICRQHGITRWPSRKLKKVGHSLKKLQLVIDSVQGAEGTIQIDSFYSTFPELTSPNFRENGPSASLKTNDNLKPLNPWPDSGLSNGGVTASKSPSSSCSRSSGSSICCSTGEKKHKIPDNVVNTGDAIAVEDPSSILKRTRSDAELHALYREEEHKPLARSQSHKILGDHHPSLTESLPPFPKSSCKSFRDSGAFRVKANFGEDKVRFSLQPSWSFKDLQQELAKRFNRNDICRTDLKYLDDDQEWVLLTCDDDLEECKDIYRLSQGQSQTIKISVNQASQHLQ

SEQ ID NO: 83 - protein, 924 aa, Jatropha curcas
MEDSILSPGTMLAAHADSAMDFDDMDELLLDGCWLETIDGSEFFNPSPHNCAPLIDSSFLWPTSENNDGDLVSRPSQKSNQQDERMSMLPRNSPLNESQSSSPVITQTIGQDMSSVARWGNDADEGSEVSRRWWIGPKAKTPVRDRLIRALGYINDFSKDKDVLIQIWVPVNEGGRRVLTTQDQHFALVPNCQRLANYRDISVNYQFSTEKDSKDMMGLPGRVFLGKVPEWTPDVRFFRSDEYPRVGHAQLYDVCGTLALPVFEQGTRTCLGVIEVVTTAQKIKYRPELETVCKALEAVDLQSSEVPIGQNVKVCDMSYEAALSEIHEVLRSACETHKLPLGQIWVPCIQQGKRGCRHSDENYYRCVSTVDHACYVRETGMQAFHEACSEHHLLKGQGVAGEAFLTNQPCFSSDITSYRKTEYPLSHHARMFGLHAAVAIRLRSVHTGKADFALEFFLPVDCTDPEKQKDMLTSLSTIIQQVCQSLRVVTDRELEAETGPVSEVVLPSYGRPRREDMLRVMHYSESYAGDNSSLTASLTGIQQSGSVVLSYEKENQKVPIDEKSMEYRISREDYNLKRSIECGVDSEVAEGSLSSVCMGKTAERKRSKAEKAITLQVLRQYFAGSLKDAAKSIGVCPTTLKRICRQHGIKRWPSRKIKKVGHSLQKLQLVIDSVQGASGALQIGSFYTNFPELASQKLSSSPFSASKQSDHLEQSSIQTDGGTFSSQVAAPKSPSSSCSQSSSSSHSCSSGLQQNPSVFSIPTSEDHIPGENSSNGVLKRVRSDAELHASSQEEQNMLPRSQSHIPLREQPNSGNLPPLPKSSSRISHEGDAQRIKVTYGNEKIRFRMPYNWKRKDLLQEIARRFFIDDINRYDLKYLDDDNEWVLLTCDDDLEECIDVCQSSENSTIKLSLQISHLMDGFSRS

SEQ ID NO: 84 - protein, 529 aa, Jatropha curcas
MDRGASALINSTFSSTSMDLDFIDKPFAHGSWLRTTDKVNFLESDPFISSVQYLDSYHQFSQKEMENLFDNPTPVYPGIGKCVVETDTCLGQSQGGESRTRKCLIEPYCSVKDRLMLAIDYLKEYVEDSDALIQIWVPTKIAGQNVLTTTDQPYSLNPSCLSLASYRNVSKAFHLTAEEDSKESAGLPGPVFLEKFPEWTPDVRFFRNDECPRKYYAELYNISGCLALPVFEQESGTCLAVVEIVTTTQKINYHLELEIVCKALEAVDLKSSQDFFPFCIKTCNEFYQIAIPEISKILKSVCETNNLPLALTWALCNRQGKNEYKQVSGKYDYYISTVDSACYMADSDLFGFYKACSTQYLFLDQGIVGKALTRNKQLFATDVTSFSKTSYPLSHHARMFNLRAALAIPLANIYTGSIEFVLEIFLPRDCQDIEEQKHMWDFLPIVIQHSCRNFHVIMDKEKENFAFVSWECLKEEPEEAFKVISHWDNNESEFSEFEQLQESSALKFGVTDESKENSSVGIDFSLSKN

SEQ ID NO: 85 - protein, 875 aa, Juglans regia
MEDGVSSPGTMLGARADLAMDLDFMDDLLFDGCWLEAMDGSEFVHQNPSTSGAQLDPSLEWPDLKANDNLKSNPSQIGNEEEIQRPLPDESQERSLVSAASLGQDMINVARCSSESKNNVIEGSELRTRWWIAPSGNPGCTTSVTQRLINAIGYLREFTRDKGVLIQIWVPVNSGNGRVLTTSNQPFSLDSSCPRLARYRDISRKFQFSAEEDSRELVGLPGRVFLDKVPEWTPDVRFFRSDEYPRVGHAQQYNICGTLALPIFEQGSRTCFGVIEVVMTTQQIKYFPEVESVRKALEAVDLRSSDALSTNNVKACNMAYLAALPEIKEVLRSACETHGLPLAQTWVPCIQQGKAGCRHSDDNYVNCVSTVDHACVVADPNMLGFHEACSEHHLLKGQGIVGGAFRTNQPCFSADITSFGKTEYPLSHHARVFGLCAAVAIHLRSIHTGTADFVLEFFLPVNCTDSVEQKKMLSSLSIIVQHVCRSLRIVTDKELEEDTNLPVNDDKPSRDQEMLHDEKSAELWQRRQDSKLERNIEFGEECSTYDEGIFPSVGMSKAGEKRRSRVEKTITLEVLRQYFSGSLKDAAKSIGVCSTTLKRICRQKGIKRWPSRQIKKVGHSLQKLQLVIDSVHGASGAIQINSFYTNFPELTSPKLSGTSPLSARKLSEYTQPSSSMQPEGELFSPQAVPKSTSSSCSQASTSSHSCSSGTHQHPPTRNIARVEDAIIGENRHQGVLSRIGSGAEIQDPSQGPKLLPKSQSHQSLNAENLVPSLKDSGHVSQEWYAQKVKVTYGDEKVRFRVQNNWKYTDLLLEIARRFYIDDMSRFNLKYLDDDAEWILLTCDADWEECIDVWQSSQSHTIKLSLQVSRHQLGSL

SEQ ID NO: 86 - protein, 871 aa, Juglans regia
MEDGVLSPGTMLDALPDSGMDLDFMDNIFFDGFWLEATDGSEFLHHSPSSSGALLVPSFEWPALEANGNLRANPSQKDNESKERSLVNAISLEQNMINVAGWSRESENNVIEGSERSTRWWIAPSGNPGCTISVAQRLIKAVEYLRELTRNKDVLIQIWVPVNRGGRRVLTTSDQPYSLYSSCPRLARYRDISGKFHFSAEEDSKESVGLPGRVFLGKVPEWTPDVRFFRSDEYPRVGHAQEFNICGTLALPIFEQGSRTCLGVIEVVMTTQQIKIRPELESVREALEAVDLRGSDALSTDNVKQACNTAYQAALPEIQEVLRSACETHRLPLAQTWVPCIQQGKEGCRHSDDNYVDCVSTVDHACIVADPNMLGFHEACSEHHLLKGQGIVGGAFRTNQPCFSTDITSFSKTEYPLSHHARVFGLHAAVAIHLRSIHTGTADFVLEFFLPVNCTDPEEQKNMLSSLSIIIQQVCQSLRVVTDKELQEDTYLPVNGKPSTEDMLHEKSREFWPCQPDSSLKRNVEFGEECSAYDEGSFPSMGMGMGMGKAGEKRRTKAEKNITLEVLRQYFAGSLKDAAKSIGVCPTTLKRICRQHGIKRWPSRKIKKVGHSLQKLQLVIDSVQGASGAFQINPLYTNFTELGSPKLSGTCSFTASKLSDHLQPSSIKAEGEFFSPEAVASKSPSSCSQTSTSSQCCSSGAQQHPLMCNVGGCEVVGENHGDGVLKRISSEAEIQATNQGPKLLSRSQSHKSLNAKNLTSSRKNSARVFQEGFAQKVKVTYGEEKVRFRMQNNWSYADLLLEIARRYNIEDMSRFYIKYLDDDAEWILLTCDADLEECIDVCQSSHSHTIKLSLQVSHHNLGKSLGISGPS

SEQ ID NO: 87 - protein, 870 aa, Juglans regia
MEDGVLSPGTMLDALPDSGMDLDFMDNIFFDGFWLEATDGSEFLHHSPSSSGALLVPSFEWPALEANGNLRANPSQKDNESKERSLVNAISLEQNMINVAGWSRESENNVIEGSERSTRWWIAPSGNPGCTISVAQRLIKAVEYLRELTRNKDVLIQIWVPVNRGGRRVLTTSDQPYSLYSSCPRLARYRDISGKFHFSAEEDSKESVGLPGRVFLGKVPEWTPDVRFFRSDEYPRVGHAQEFNICGTLALPIFEQGSRTCLGVIEVVMTTQQIKIRPELESVREALEAVDLRGSDALSTDNVKACNTAYQAALPEIQEVLRSACETHRLPLAQTWVPCIQQGKEGCRHSDDNYVDCVSTVDHACIVADPNMLGFHEACSEHHLLKGQGIVGGAFRTNQPCFSTDITSFSKTEYPLSHHARVFGLHAAVAIHLRSIHTGTADFVLEFFLPVNCTDPEEQKNMLSSLSIIIQQVCQSLRVVTDKELQEDTYLPVNGKPSTEDMLHEKSREFWPCQPDSSLKRNVEFGEECSAYDEGSFPSMGMGMGMGKAGEKRRTKAEKNITLEVLRQYFAGSLKDAAKSIGVCPTTLKRICRQHGIKRWPSRKIKKVGHSLQKLQLVIDSVQGASGAFQINPLYTNFTELGSPKLSGTCSFTASKLSDHLQPSSIKAEGEFFSPEAVASKSPSSCSQTSTSSQCCSSGAQQHPLMCNVGGCEVVGENHGDGVLKRISSEAEIQATNQGPKLLSRSQSHKSLNAKNLTSSRKNSARVFQEGFAQKVKVTYGEEKVRFRMQNNWSYADLLLEIARRYNIEDMSRFYIKYLDDDAEWILLTCDADLEECIDVCQSSHSHTIKLSLQVSHHNLGKSLGISGPS

SEQ ID NO: 88 - protein, 944 aa, Juglans regia
MEIEREFNMEYGAFTSNSTTYGNFSENNMISNTELGFMDELLIEGCWLETTGLGLNLFPPGPLPASAQAFNHEYRPSHHYLPPLEINSISHLSINQYYSQQIYQESTEGTFPESEGILVEGTELGMIRRWWIGPSWANPGPCSSVKERLMMAVGYLTECTKNMNVLIQIWVPISWRSSGGRYNFLTTQDQPYSFGANCKSLANYRDVSRAYDHEFAVEEDIDQVFWEQLPEYWTPDIVRFFKRDEYPHDIINYAHDEQYSRGVRGFLALPVFERGSGTCLGVVEIVTTADQNINVHRPELENVICQALDQANVDLRSYQSFSPPSVKAYNYDELYQVALAEIVEVLATVCKTHRLPLALTWAPCLQQGKGGCRHSDENYAHCLSTVDTACFVSDAEVLGFHEACSEYHLFRGQGTVGTAFTTTKPCFATDMSAFSKIEYPLSHHARMFGLRAAVAIPFRSLYTGSADFVLEFFLPKDCHDTEEQNQMLNSLSIVLQQACRSLHAVIEKVVLDEDEVIYSVEEVVIASDDVRIKKEEPQKSVSSPLKEACSKESSWIAHMKEVQQKGKGVSISLEYQEEDPKEEFKVTTHWDNTQGASLNGQGLSEFGQLQQSSGSKGSVDGGGGSYSYGGRRSSSGRKTGEKRRTKTQKTISLSVLRQYFAGSLKDAAKSIGVCPTTLKRICRQHGITRWPSRKIKKVGHSLRKLQSVIDSVPGAEGAIQIGSFYTNFPEFNSPGNGSFSSMKMISDGSKQSNPIPESSLLNHGSGTHSKSLPSSCSQTFGPSSFCASTAAQQHSTPINALSNADTLMREKPGGLLPMACSDADLHTLNRHEQNLLPAAECLKSFGGLPDLETLPILLESSSHNSGDGDLQLEIARRLNLDYISRVDLRYLDDDREYWVLLACDADLQECIHIFRASQSHTLRLSLQHASNPYLGSPFGSSDLS

SEQ ID NO: 89 - skipped

SEQ ID NO: 90 - protein, 904 aa, Lotus japonicus
MGDGAVTTTSAAMMEAPTNETSMDFEYMSDLLLDGCWLEASADGSNFLLQQSPPFSSPLFDPSFSWPALETNEPTHVEDQHESQEAPLGNTQLVSQSQNMVNVVDGRYNNQSETETHSVVEGTSDGVKRWWIAPTCSPGLGPSIMEKLIRALKWIKQFNWNKDMLIQIWVPVPRGDRPILSANNLPFSLDSGSENLARYREISEGFQFSAEEDSKELVPGLPGRVFRDKVPEWTPDVRFFRSDEYPRVEHAREFDICGTLAVPIFEQGSRTCLGVIEVVMTTQQINYVPQLESVCKALEVVDLTSLKHSSIQNAKQARDKSYEAALPEIQEVLRSACHMHKLPLAQTWVSCFQQGKDGCRHSEDNYLHCISPVEQACYVGDPSVRFFHEACMEHHLLKGQGVAGKAFMINQPFFSTDITMLSKTDYPLSHHARLFGLRAAVAIRLRSIYSSADDYVLEFFLPVNCNDSEEQKNMLISLSIIIQRCCRSLRVITDKELERTSSSVEVMALEDSGFARTVKWSEPQHITSVASLEPEEKSSETVGGKFSDLREHQEDSILKGNIECDRECSPFVEGNLSSVGISKTGEKRRAKADKTITLEVLRQYFPGSLKDAAKNIGVCTTTLKRVCRQHGIKRWPSRKIKKVGHSLQKLQLVIDSVQGASGASFKIDSFYSNFPDLASPNLSGASLVSALNQSENPNSLSIQPDLGPLSPEGATKSLSSSCSQGSLSSHSCSSMPEQQPHTSDVACNKDPVVGKDSADVVLKRIRSEAELKSHSENKAKLFPRSLSQETLGEHTKTEYQSYLLKTCHKATPKEDAHRVKVTYGDEKTRFRMPKSWSYEHLLQEIARRFNVSDMSKFDVKYLDDDLEWVLLTCDADLEECIDVCLSSESSTIKLCIQASSGMRS

SEQ ID NO: 91 - protein, 766 aa, Lupinus angustifolius
MEYSALVHNSGVFGSFSSDTDEAADLADELLAEGCWVETTDGDHIQQQQDIEINGGSFVGKRWWIGPTSSSSTSTSSSVKERLVVSVGYLKEYTKNTNVLIQIWVPQSTRSSGFEFNHDLVVTSTNPNSNVRFFRSQDYPRVHHQLQQYDVRGCLSLPVFQRGTATCLGFLEITTTNHNSSSFINYHHRPQQLIDNNLSIPLDHGAADFRSCHQNFIPPSSVKVYDELYQAALDEIVDVLTSVCKTHNLPLALTWAPCIQQGKCGCGHSTTDQNYVYCVSTVDSACFVADLDMLGFQEACSQYHLFRGQGIVGTAFTTAKPCFAIDITAFSKAEYPLCHHASMFGLHAAVAIPLRSVYTGSADFVLEFFLPKDCHDPEEQRHMLKSLSMLVQQACRSLHVVTEDEFTLPLPPPPPPLLSSSYNKEEEAHMIEKLLFASTPCCSSQVESSSSWIAHMMEAQEKGKGVSVSLEYEVEEAKEEFKVTKWDGSNEVVVEGERREVFSSEFSELSSGSRSRASTVEVGSGGGEECYSFSGRRSSSTTTTTTTNSGCGLRKTGEKRRTKAEKTISLPVLRQYFAGSLKDAAKSIGVCPTTLKRICRQHGITRWPSRKIKKVGHSLKKLQLVIDSVQGAEERHPNDHAFLKRELLIQEDTRSKAAGLRVKASFVDEKIRFSLQTNWSFRELEVEIGSRFSINDMRNIVVKYLDDEGEWVVLACDADLEECKDLHRSSQGRTIRLSLFQSSPNNTNNNTNAMFGGCSSTSPSSN

SEQ ID NO: 92 - protein, 866 aa, Lupinus angustifolius
MNFSSMDDDDAVSAPGTTILDDGTISMDFDYIDELFFDGCWFETTAEGSDFPPFDSSFSWCALEEQHESQEAFFDDVKVDDVSSNQQYESEIQSFEGTSEGVTRWWIAPTPNNPGPGYSVMEKLMMALNCIQDLNRSKDMLIQIWVPVNRGGKQILTTNDLQFCLGTNSTNLAKYREISMRYQFSTEEEDSKGLVPGLPGRVFREKVPEWTPDVRFFRSDEYPRVDHAQEYEVRGTLALPIFEQGSRTCLGVIEVVMTSSQINYRSELESVCKALEGVDLRSSKLSSTQNVKACNKSYEAVLPEIKEVLRVACEMHKLPLAQTWIPCIQQGKEGCRHSEDNYLHCISPVEHACYVNDAPIRAFHDTCSEHHLLKGQGVAGGAFMTNQPCFSSDITSLRKTDYPLSHHARIFGLQGAVAIRLRSIYSSTDDYVLEFFLPVNCNDSEEQKKMLTSLSMIIQSVCHSLRVITDNELEEETNLSFGELIALADSRSARTEEKSSGTMVGKFSDLKQLQDLNENLDGVGECSTFGEGNLSSVGISKMGEKKRTKADKTITLQVLRQYFSGSLKDAAKNIGVCTTTLKRICRQHGIKRWPSRKIKKVGHSLQKLQLVIDSVQGASGAFQIDSFYSNFPDLASPNLSGTGLLSTLKQSDNPNSLSTTQPNLAGSLTPEDASKSRSSSCSQNSISSHPCSSMSEQQHQTINVVDDNKDLVVVGEDYTDVLLKRNRSEAELKRLSQQDNKAKLFPRSLSQETLVEQHPKTNSIMAPKKDDFHRVKVTYGDEKTRFRMLKTWAYEDLLHEICSRFNISDMSKYDVKYLDDDCEWILLTCDADLEECIDCCQSSECSTIKLSLQVSDLRMRSSLEFT

SEQ ID NO: 93 - protein, 844 aa, Lupinus angustifolius
MNFSSMDDDDAVSAPGTTILDDGTISMDFDYIDELFFDGCWFETTAEGSDFPPFDSSFSWCALEEQHESQEAFFGTSEGVTRWWIAPTPNNPGPGYSVMEKLMMALNCIQDLNRSKDMLIQIWVPVNRGGKQILTTNDLQFCLGTNSTNLAKYREISMRYQFSTEEEDSKGLVPGLPGRVFREKVPEWTPDVRFFRSDEYPRVDHAQEYEVRGTLALPIFEQGSRTCLGVIEVVMTSSQINYRSELESVCKALEGVDLRSSKLSSTQNVKACNKSYEAVLPEIKEVLRVACEMHKLPLAQTWIPCIQQGKEGCRHSEDNYLHCISPVEHACYVNDAPIRAFHDTCSEHHLLKGQGVAGGAFMTNQPCFSSDITSLRKTDYPLSHHARIFGLQGAVAIRLRSIYSSTDDYVLEFFLPVNCNDSEEQKKMLTSLSMIIQSVCHSLRVITDNELEEETNLSFGELIALADSRSARTEEKSSGTMVGKFSDLKQLQDLNENLDGVGECSTFGEGNLSSVGISKMGEKKRTKADKTITLQVLRQYFSGSLKDAAKNIGVCTTTLKRICRQHGIKRWPSRKIKKVGHSLQKLQLVIDSVQGASGAFQIDSFYSNFPDLASPNLSGTGLLSTLKQSDNPNSLSTTQPNLAGSLTPEDASKSRSSSCSQNSISSHPCSSMSEQQHQTINVVDDNKDLVVVGEDYTDVLLKRNRSEAELKRLSQQDNKAKLFPRSLSQETLVEQHPKTNSIMAPKKDDFHRVKVTYGDEKTRFRMLKTWAYEDLLHEICSRFNISDMSKYDVKYLDDDCEWILLTCDADLEECIDCCQSSECSTIKLSLQVSDLRMRSSLEFT

SEQ ID NO: 94 - protein, 847 aa, Lupinus angustifolius
MEYDALVNNNSGLFGSLSSSVDTDEAIDLTDELLVEGCWVETTTGGGDHIHQLHQDIELLNGGSLVGKRWWIEPSTTTSSLSSSVKERLVVAVGYLKEYTKNTNILIQIWVPQRSNSRLPPFEFNHDHLVTPTNVKFFRNQQVHHQLQQYDVRGCLTLPVFQRGTATCLGVLQITTTTNHNSSPFTTYHRPQQLIHNNLSLPLDHAVVDFRSCQNLIPTSSVKVYDDELYQAALNEIVEVLTSVCKTHNLPLALTWAPCIQQGKYGCGHSATDQNYVYCVSTVDSACFVVDLDILGFQEACSQYHLYRGQGIVGTAFTTAKPCFAIDITAFSKAEYPLSHHANMFGLHAAFAIPLRSLYTASADFVLEFFLPKDCHDPEEQRHMLNSLSMLVQQGCRSLHVVTEDEFTLPLPSPPPPPPPPHNKEEAHMIEKLLFASTLSSSQVESSSWIAHMMEAQQKGKGVSVSLEYELEEPKEEFKVTTNWDGSNELIQAQTTQVFSEFTEQSSGSRSRASTVEVGTGGGEECYSFSGRHSSTTTTTTTNSGGGGRKTGDKRRTKAEKTISLPVLRQYFAGSLKDAAKSIGVCPTTLKRICRQHGITRWPSRKIKKVGHSLKKLQLVIDSVQGAEGAIQIGSFYTSFPELCSDSSNKMHTEYDNNNNNNNNNGFYNGDVCSQNFAASSMINNTNNNGGVDVLMMTESSPDHHHDHAFVNRELSIQEDTKLYFTRSKAAPSGWRGALRVKATFLDEKIRFSLQPKWGFRELQVEIRKRLNLNDVRNIDLKYLDDEGEWVVLACDGDLEECKDLHRSSQGRTIRLSLFQASPVHNNNNNLSNTFSGGRSTTPSSSS

SEQ ID NO: 95 - protein, 860 aa, Lupinus angustifolius
MGDDATILDDGTISMDFDYMNELFFDGCWLETTAEEFDFPLFDSSLFSWNVLENEHESQEALFSTQDNIVNVDVSSNKQNQSEIQSLEGASEGFTRWWIAPTPNNPGTSYSVMEKLMKGLKCIHDLNRNKDMLIQIWVPVNRGGKQILTTNDHQFCLGTRSTNLAKYREISMRYHFSTEEDGSKGLVPGLPGRVFKEKVPEWTPDVRLFRIDEYPRVDHAQEYEVRGTLALPIFEQGSRTCLGVIEVVMTTSQLNYRPELESVCKALEAVDLRSSKLSSIPDLKASHKSYEAVLPEIREVFRSACEMHKLPLAQTWIPCIQQGKEGCRHSEDNYLHCISPVEHACYVNDPSIRAFHDACSEHHLLKGQGVAGGAYMTNQPCFSSDITSLSKTDYPLSHHARMFGLQGAVAICLRSIYNSMDDYVLEFFLPVNCIDSEEHKRMLTSLSMIIQRVCHSLRVITDKELESETNLLVDEVTALADNRSRRTAICKEVLQDGMVDSLDTEEKSKGAKFSDLRQQQDLKGNLDSVGGCPTFGEGNLSSVGISKTEEKKRTKADKTITLQVLQQHFAGSLKDAAKNIGVCTTTLKRICRRHGIKRWPSRKIKKVGHSLQKLQLVIDSVQGASGACQIDSFYSNFPDLLSPNLSGTDMLSTLKQSDNPNSLSPKDVLKSPSSSCSQSSISSHLCSTMSEQQYHTSNAVEGNKDSIVVEDSANVASTRIRNEAELRSLVSQDNEEKLLPISLSQETLGEQQHPKTKGNATKKEESHRVKVTYGDEKSRFRMPTTWSYENLLQEIGMRFHISNMSKFNVKYLDDDCEWVLLTCDADLEECIDVCQSSENRTIKLALQVSNLGLRSSLEFT

SEQ ID NO: 96 - protein, 855 aa, Lupinus angustifolius
MEYSALVHNSGVFGSFSSDTDEAADLADELLAEGCWVETTDGDHIQQQQDIEINGGSFVGKRWWIGPTSSSSTSTSSSVKERLVVSVGYLKEYTKNTNVLIQIWVPQSTRSSGFEFNHDLVVTSTNPNSNVRFFRSQDYPRVHHQLQQYDVRGCLSLPVFQRGTATCLGFLEITTTNHNSSSFINYHHRPQQLIDNNLSIPLDHGAADFRSCHQNFIPPSSVKVYDELYQAALDEIVDVLTSVCKTHNLPLALTWAPCIQQGKCGCGHSTTDQNYVYCVSTVDSACFVADLDMLGFQEACSQYHLFRGQGIVGTAFTTAKPCFAIDITAFSKAEYPLCHHASMFGLHAAVAIPLRSVYTGSADFVLEFFLPKDCHDPEEQRHMLKSLSMLVQQACRSLHVVTEDEFTLPLPPPPPPLLSSSYNKEEEAHMIEKLLFASTPCCSSQVESSSSWIAHMMEAQEKGKGVSVSLEYEVEEAKEEFKVTKWDGSNEVVVEGERREVFSSEFSELSSGSRSRASTVEVGSGGGEECYSFSGRRSSSTTTTTTTNSGCGLRKTGEKRRTKAEKTISLPVLRQYFAGSLKDAAKSIGVCPTTLKRICRQHGITRWPSRKIKKVGHSLKKLQLVIDSVQGAEGAIQIGSFYTSFPELCSASARSDSSNKMHAYHPKTECDNNNNNGFYNGDACSQNFAASTMMMINNTNDNSNNNNNNNSNGGVDDVVMMTERHPNDHAFLKRELLIQEDTRSKAAGLRVKASFVDEKIRFSLQTNWSFRELEVEIGSRFSINDMRNIVVKYLDDEGEWVVLACDADLEECKDLHRSSQGRTIRLSLFQSSPNNTNNNTNAMFGGCSSTSPSSN

SEQ ID NO: 97 - skipped

SEQ ID NO: 98 - protein, 1052 aa, Malus x domestica
MEVRVVYTGKGWVEFVGKMDENHRKTLRVETGLRVEGELGRFPPSSFPLLSSLLIVRLLQGAVMDDGVLSPATMLGAQPDSAMDLDFMDELFLEGCWLEARDGPEFPNQSLPNTPLNPSFFWHTLETNGNMAMTPSQNSNQEEMQTPFFKQLEEGPVNPQSPCQSMIEDVVAYSGQSEDPTIGRELSRRWWIGPTGNDGSASSVTQRLMTALMYIREVMRNKDVLVQVWVPVNRGGRDVLTTNELFCLDPNCSRLAKYRDISVNYQFSTGEDSTEMVKGLPGRVFSGKVPEWTPDARYFTSDEYPRVGYAQQYDVSGTLALPIFEQGSRTCLGVIEVVTTDQKIRYQPDIDGICKALEGCDKPYHAALPEIQEILRSACETHKLPLAQTWVSCIEQGKDGCRHSDDNYIHCVSTVDHACHVADPYIQGFHEACSEHHLLRGQGIVGRAFMTNQPCFSDDITSFFKTEYPLSHHARMFNLHAAVAIRLRSTDTSSTDFVLEFFLPLECRDPKEQKKMLNSLSLIIQQTCRSLRVVTDKEVEEETKFHVSEVIVPSDPGPSNIACFTEVQQNGNAVSMFPNKKQRKVLSVKLSKLRQHQEYSNLKSVECGEEFSVLGEGEGSFSTVGASKTREKRRAKAEKDINLQVLRKYFSGSLKDAAKSIGVCSTTLKRICRQHGIKRWPSRKIKKVGHSLQKLQRVIDSVEGASGAFQINSFYTNFPELTSPKLLGTSPFSNSKLSDQPNQENLSPEGGDFSPQATASKSPPSSCSQNSSSSQCCSSKTRQHPFSCNVAGNDDPVGDNSRDGVLKRVRSEAGLHDFCQDRTELLPRSQSQKILSEQQNLQSIPPSLKNNGRVAQVEVQRVKVAYGDEKTRFRMQSNWRYEDLVQEIAKRFSIQDMSNFDIKYLDDDSERVLLTCDDDLEECVDIDGKEGWEEQSDEGMGVGKNNEGMVSPGFSPNVPMRISQIPRSILPPNRPNHSLLLNSKQKLQHGFQRFGLSVAKPTRSLCTKAVLSEIPNQELYGKVGANSTGPIPIGQLVGAVEKAAKTGAEFSL

SEQ ID NO: 99 - protein, 501 aa, Manihot esculenta
MEDGGFKTDSVSRNLPGAAMDLDFMDELLYDGCWLTTDGLNISQPGLSSSTVPNDSSQYFPFVDTNLHQQINQDGMENNFPENPPLSNPKVEQLADDESQDHKSVKITTSSVSAGFPNEGSELSRSFWIEPRADPGPTSSVKVRLMHAIRRLKECTKDREVLVQIWVPTKKEGKHVLTTTDQPCFVSLKSESLARYRYVSENYHFPVEGDSKESLGLPGRVFLGKLPESTPDVRFFRNDEYPRKTYAKQYNISGSLAVPVFERGTGTCLGVVEVITTTRYINYRSELETICKALEAFDLRSSQDFCPPSVKACKEFCQAAVPEISEILGSVCETHKLPLALTWARCFQQGKGGCRHFDEKFANCISTVDSACFVDDRECLVFHAACSEQFLSLGQGIVGRAFVTNKQCFASDVTAFSKTDYPLSHHAKVLGLHAAVAIPLRSTHDGSADFVLELFLPKDCRDPEEHKQMQELLPIAIQQACRSLQVVMDKELEDVGGSAER

SEQ ID NO: 100 - protein, 654 aa, Manihot esculenta
MEDGGFKTDSVSRNLPGAAMDLDFMDELLYDGCWLTTDGLNISQPGLSSSTVPNDSSQYFPFVDTNLHQQINQDGMENNFPENPPLSNPKVEQLADDESQDHKSVKITTSSVSAGFPNEGSELSRSFWIEPRADPGPTSSVKVRLMHAIRRLKECTKDREVLVQIWVPTKKEGKHVLTTTDQPCFVSLKSESLARYRYVSENYHFPVEGDSKESLGLPGRVFLGKLPESTPDVRFFRNDEYPRKTYAKQYNISGSLAVPVFERGTGTCLGVVEVITTTRYINYRSELETICKALEAFDLRSSQDFCPPSVKACKEFCQAAVPEISEILGSVCETHKLPLALTWARCFQQGKGGCRHFDEKFANCISTVDSACFVDDRECLVFHAACSEQFLSLGQGIVGRAFVTNKQCFASDVTAFSKTDYPLSHHAKVLGLHAAVAIPLRSTHDGSADFVLELFLPKDCRDPEEHKQMQELLPIAIQQACRSLQVVMDKELEASSLNEPYPLGSSWFAQMLEAQQKGKRVCVSWDNPEEPKEEFKVATHWDEGLEKLYEGQVFAESGQLQQNSGRKDSTEGGNNSSFAGQQSLGSRKTGEKRRTKTEKTISLEVLRQYFAGSLKDAAKSIGVCPTTLKRICRQHGISRWPSRKLKKKTFINDE

SEQ ID NO: 101 - protein, 933 aa, Manihot esculenta
MEDHILSPGTMLLGAHADSTMDFDYMDKLLLEGFRLESIDGSEFFNPSSSSSAACVDSSFLWPASEISNGNFASSRSNQEDEHILLPRIAPPNEAHGRSLVTAQAHGEDIGSAYRLGDNTVDGSEVSRRWWIGPRTSPGSKTSVRDRLIRALGYIKDFTKDNNILIQIWVPVDKGGRRVLTTHDQCFALVPNCQRLANYRHVSINYQFLAEEDSKHMVGLPGRVFLGKVPEWTPDVRFFRSDEYPRVHDAQLCDVRGTLALPVFEQGSRTCLGVIEVVMTKQKIKYHPELERICKALEAVNLQSSEVPSLQHVKACDTSYQAVLPEIHEVLKSACETHKLPLAQTWVPCIQQGKGGSRHSDENYYRCVSTVDHACYVRDSGVQAFQEACSEHHLLKGQGVAGEAFLTNQPCFTSDLTSYGKTEYPLSHHARMFGLHAAVAIRLRSVHTGTADFVLEFFLPADCKDPEEQKKMLTSLSIIIQEVCQSLRVVTDKELEEENDLPISEVLALSYGTPPDEEMFRVTQPYSESYHGDNLSWSDSFPGIQQSGSAVSSFQIEKQKLLIHEKSVDCRQTQEDYSPKVSVEYGGDSAIAEGSFSSVCVSKTGEKRRTKGEKTITLQVLRQYFAGSLKDAAKSIGVCPTTLKRICRQHGIKRWPSRKIKKVGHSLRKLQVVIDSVQGASGAFQIDSFYTKFPELASPNLSRSTPLSTSKQLGHPESSSIQPEGGIFSSQVAAPKSPSSSSSQSSSSSHCCSSGTEQHASTLTIPTCKDLMLGENSGNCVLKGVKSDAELHVSIQEEQNLLPRSQSQKSLWEQPNLGNLPPLAKSSNRICQEIDGQRVKVTYGNEKIRFRMPNNWELKDLLQEIARRFNIDDIHKYDLKYLDDDSEWVLLTCDDDLEECIDLCQSSQSHTIKLLLQISPHLLDRSTNSRGLS

SEQ ID NO: 102 - protein, 934 aa, Manihot esculenta
MEDRILSTGAMLGTRADSAMDFDCMDKLLLEGCWLETIDGSEFFNPSPFSSAAFVDASFQWPTSEINNCDLASSPSKRSNREEEQISLLPRNSALNEAHGRSLINAEALDHGVGSADRLGYNTTEGSEVSRRWWIGPRTNPGPKTSVRDRLIRALGYIREFTKDKDVLIQIWVPVDKGGRRVLTTHDQRFALVPNCQRLANYRDISTNYQFSVEEDSKDMVGLPGRVFLGKVPEWTPDVQFFRSDEYPRVDHAQQYDVRGTLALPVFEQGSSTCLGVIEVVTTKQKIKYHPELESVCMALKAVDLQSSEVPSLQHVKMCDMSYQAVLPEIHEVLRSACETHKLPLAQTWVPCIQQGKGGCRHSDNNYYRCVSTIDLACYVHDTGVQAFHEACSEHHLLKGQGVAGEAFLTNQPCFSSDITSYRKTEYPLSHHARMFGLHAAVAIRLRSLHSGAADFVLEFFLPAYCTDPEKQKEMLTSLSITVQQVCQSLRVVTDKELEEETGCPISELLASSVDTPPKEEMLVTQPYSVSYGGESLSHADRLTGIQQSGSVVSSCQKKKQKVLEDQISVDCWQNQEDYSLKVSVESGGDSAVAEGSFSSVFKGKKGEKRRTKAEKSITLQVLQRYFAGSLKDAAKSIGVCPTTLKRICRQHGIKRWPSRKIKKVGHSLQKLQLVIDSVQGASGSFQIGSFYTNFPELASPNLSRSNLFSTLKQSDHPEPSSIQSERVIFSSQAATPKSPSSSCSQSSNSSHCISSGTQLHASAVTTPTSEDPVLGENSDNCVLKRARSDAELRASIQEQNLLPRSQSQKSLGEQPNLGNLLPLPNNSSSILRDFDTQRVKVTYGNEKIRFRMPNNWELKDLLQEIARRFNIDDIHKYELKYLDDESEWVLLTCDDDLEECIDVCQSSQTHTIKFLLQVSPHLFDRSMNSRGLS

SEQ ID NO: 103 - protein, 924 aa, Manihot esculenta
MLGTRADSAMDFDCMDKLLLEGCWLETIDGSEFFNPSPFSSAAFVDASFQWPTSEINNCDLASSPSKRSNREEEQISLLPRNSALNEAHGRSLINAEALDHGVGSADRLGYNTTEGSEVSRRWWIGPRTNPGPKTSVRDRLIRALGYIREFTKDKDVLIQIWVPVDKGGRRVLTTHDQRFALVPNCQRLANYRDISTNYQFSVEEDSKDMVGLPGRVFLGKVPEWTPDVQFFRSDEYPRVDHAQQYDVRGTLALPVFEQGSSTCLGVIEVVTTKQKIKYHPELESVCMALKAVDLQSSEVPSLQHVKMCDMSYQAVLPEIHEVLRSACETHKLPLAQTWVPCIQQGKGGCRHSDNNYYRCVSTIDLACYVHDTGVQAFHEACSEHHLLKGQGVAGEAFLTNQPCFSSDITSYRKTEYPLSHHARMFGLHAAVAIRLRSLHSGAADFVLEFFLPAYCTDPEKQKEMLTSLSITVQQVCQSLRVVTDKELEEETGCPISELLASSVDTPPKEEMLVTQPYSVSYGGESLSHADRLTGIQQSGSVVSSCQKKKQKVLEDQISVDCWQNQEDYSLKVSVESGGDSAVAEGSFSSVFKGKKGEKRRTKAEKSITLQVLQRYFAGSLKDAAKSIGVCPTTLKRICRQHGIKRWPSRKIKKVGHSLQKLQLVIDSVQGASGSFQIGSFYTNFPELASPNLSRSNLFSTLKQSDHPEPSSIQSERVIFSSQAATPKSPSSSCSQSSNSSHCISSGTQLHASAVTTPTSEDPVLGENSDNCVLKRARSDAELRASIQEQNLLPRSQSQKSLGEQPNLGNLLPLPNNSSSILRDFDTQRVKVTYGNEKIRFRMPNNWELKDLLQEIARRFNIDDIHKYELKYLDDESEWVLLTCDDDLEECIDVCQSSQTHTIKFLLQVSPHLFDRSMNSRGLS

SEQ ID NO: 104 - protein, 912 aa, Manihot esculenta
MDHGASALNSTVWTFSSTTMDLDVMDKPLSQGYCLENNDRANSLEPEPFTSHVLYDHSEYSSFSEDLYHQIYRKEMKPLFENIPSAYHGIEGAETAKSFVQSESFTLEGSNSGSRWLIDPSYSVKQRLMLAIKYLKEYVEDSDVLIQIWVPTQIGGQNVLTTIDQPYSLNPSCKSLASYRNVSKTFQLTAEENLKELAGLPGRVFLGKLPEWTPDVRFFRSDECPRKSYAKMYNISGCLALPVFEQDNGVCLAVVEIVTTTQKISYSLELEIVGRALEAVDLKSSQDFFPLGIKACNESYQISILEISDILQFVCKTHGLPLAMTWALRDRQGEVEHWQFSKKYDYCLSTVDSACYVADSDLLGFHEACSEHYLFPNQGIVGKAFTTKKQWFATDITSFSKANYPLSHHARMFNLRAALAVPLCNIYTGLIEFVLELFFPWDCKDIEEQKHFWDMLSIVMQQACKSFHVIVDKEIDEEVSEQMVVASDGRYNREGIQELVASPSNESSQEESSSTPHEMDSQNKDKFSFISWECPKEELEDEFKVITHWENDEMGLYQEPVFSDFQKATQSSMPKPGVDIAENFSNGRHCSSSSEKASDKRQTKIEKTITLQILRQYFAGSLKDAAKSIGVCPTTLKRICRQHGINRWPSRKIKKVDHSLRKLQLIVNSIHGAEGLIQIDSFYKSFPELSSSKFSGNDPFSSSRMSENSCILKPQPRSRLFSPKGKVPKSRSSSCSQNSGSTDEEKRLTTINGLNTGCSLAIDDPVLMLKKAYSKPELHNLNQEEKEPKVLKSSLSHKTLHGNTTGHSLQDGMVFRVKATFGEENIRFSFLPNWDFRDLQQEIAKRFKIDDFSRIDLKYLDIDQEPVLLTCDADLEECIDLLRLSQCNTIKISLHQASKSNLGSSFRIKGLF

SEQ ID NO: 105 - protein, 930 aa, Manihot esculenta
MEDGGFKTDSVSRNLPGAAMDLDFMDELLYDGCWLTTDGLNISQPGLSSSTVPNDSSQYFPFVDTNLHQQINQDGMENNFPENPPLSNPKVEQLADDESQDHKSVKITTSSVSAGFPNEGSELSRSFWIEPRADPGPTSSVKVRLMHAIRRLKECTKDREVLVQIWVPTKKEGKHVLTTTDQPCFVSLKSESLARYRYVSENYHFPVEGDSKESLGLPGRVFLGKLPESTPDVRFFRNDEYPRKTYAKQYNISGSLAVPVFERGTGTCLGVVEVITTTRYINYRSELETICKALEAFDLRSSQDFCPPSVKACKEFCQAAVPEISEILGSVCETHKLPLALTWARCFQQGKGGCRHFDEKFANCISTVDSACFVDDRECLVFHAACSEQFLSLGQGIVGRAFVTNKQCFASDVTAFSKTDYPLSHHAKVLGLHAAVAIPLRSTHDGSADFVLELFLPKDCRDPEEHKQMQELLPIAIQQACRSLQVVMDKELEGNRSWQMAIASNEINNKQETHIFAASSLNEPYPLGSSWFAQMLEAQQKGKRVCVSWDNPEEPKEEFKVATHWDEGLEKLYEGQVFAESGQLQQNSGRKDSTEGGNNSSFAGQQSLGSRKTGEKRRTKTEKTISLEVLRQYFAGSLKDAAKSIGVCPTTLKRICRQHGISRWPSRKLKKVGHSLKKLQLVIDSVQGAEGAIQIGSFYNTFPELTSPSFCRKPSLMMNENLKPLNPQPESGTSNAGATASKSPSSSCSQSSGSSISCSTGAKEHTITNNTSNTEDALAVEDPGGVLKRTLSDAELHALYREEPKPLARSQSHKILGDQPSLDQILPPLGKGSGKNLRENGAFRVKANFGEDKVRFSLQPSWCFKDLQQELAKRFNISDVCKIDLKYLDDDHEWVLLTCDADLEECKDIYRLTQSQTIKLSVHQASQNLR

SEQ ID NO: 106 - protein, 906 aa, Manihot esculenta
MEDGGFKTDSVSRNLPGAAMDLDFMDELLYDGCWLTTDGLNISQPGLSSSTVPNDSSQYFPFVDTNLHQQINQDGMENNFPENPPLSNPKVEQLADDESQDHKSVKITTSSVSAGFPNEGSELSRSFWIEPRADPGPTSSVKVRLMHAIRRLKECTKDREVLVQIWVPTKKEGKHVLTTTDQPCFVSLKSESLARYRYVSENYHFPVEGDSKESLGLPGRVFLGKLPESTPDVRFFRNDEYPRKTYAKQYNISGSLAVPVFERGTGTCLGVVEVITTTRYINYRSELETICKALEAFDLRSSQDFCPPSVKACKEFCQAAVPEISEILGSVCETHKLPLALTWARCFQQGKGGCRHFDEKFANCISTVDSACFVDDRECLVFHAACSEQFLSLGQGIVGRAFVTNKQCFASDVTAFSKTDYPLSHHAKVLGLHAAVAIPLRSTHDGSADFVLELFLPKDCRDPEEHKQMQELLPIAIQQACRSLQVVMDKELEASSLNEPYPLGSSWFAQMLEAQQKGKRVCVSWDNPEEPKEEFKVATHWDEGLEKLYEGQVFAESGQLQQNSGRKDSTEGGNNSSFAGQQSLGSRKTGEKRRTKTEKTISLEVLRQYFAGSLKDAAKSIGVCPTTLKRICRQHGISRWPSRKLKKVGHSLKKLQLVIDSVQGAEGAIQIGSFYNTFPELTSPSFCRKPSLMMNENLKPLNPQPESGTSNAGATASKSPSSSCSQSSGSSISCSTGAKEHTITNNTSNTEDALAVEDPGGVLKRTLSDAELHALYREEPKPLARSQSHKILGDQPSLDQILPPLGKGSGKNLRENGAFRVKANFGEDKVRFSLQPSWCFKDLQQELAKRFNISDVCKIDLKYLDDDHEWVLLTCDADLEECKDIYRLTQSQTIKLSVHQASQNLR

SEQ ID NO: 107-108 - skipped (2 entries)

SEQ ID NO: 109 - protein, 850 aa, Medicago truncatula
MGDGAAVTSSATNTMMEAPPQDENLMDFDYMSELLLDGCWLEASADGSEFLLQSSPFSNPIFDPSFSWPVLENNEQPGNDVRHESQDVPLGTEQESRIIVNNAGSSDLQQCEFKTHLGEGVSRLWIPPTPNPGPGGSSITEKLIRALKWIKDFNRNKDMLIQIWVPVNRGDDRPILRANDLPFSLESRSLNLAKYREISVRYQFSAEVEDSKELVAGLPGRVYRDKIPEWTPDVRFFRSDEYPRVDHAQECDVHGTLAVPVFEQGSRTCLGVIEVVMTTQQSNYGRELETVCKALEVVDLSSSGHSSPQNVKACVKSYETALPEIQEVLRSACEMHKLPLAQTWVSCIQQGKDGCRHSDDNYTHCISPVEYACYVGDSSVRFFHEACMEHHLLIGQGVAGGAFMTNQPCFSTDITSLSKTDYPLSHHARLFGLRAAVAIRLRSIYSISDDYVLEFFLPVDCNDGEEQKKMLTSLSMIIQRVCRSLRVITDKELEKNNLSSNEVMAVADIGFATDAVQSGLQHKRMAVSLDGEEKFNETMSSKFSEQRRQQESLTLRGDADCGRECSPSVEGNFLSSLGVNRTGEKRRAKAEKTITLQVLRQYFAGSLKDAAKNIGVCTTTLKRICRQHGIKRWPSRKIKKVGHSLQKLQLVIDSVQGASGSFQIDSFYSKFSDLSSPNLSGSTLISTLNQVDNPVSLSIQPDPDSLSPEGASKSPSSSCSQSSYSSHSCSSLSEQQHHTNNVAAGNKDSLVGEDSVDVVLKRIRSEAELKSLIPDNKSKLMPRSQSQETLGEHPKTEYRKSLLKTTRKASQKEDAHRVKVTFGDEKTRFRLPKIWCYEDLVQEIARRFNI

SEQ ID NO: 110-130 - skipped (21 entries)

SEQ ID NO: 131 - protein, 860 aa, Mucuna pruriens
MEYGGLVQNGAYGSLSDFLAPETDLIDELLVEGCWLETRVGCGSYLNCGTESNEAQIIFQEESEAESLMVGKRWWIGPRANPGPSSSVKERLVLGVGYLKEYAKNSNVFIQVWVPAVARRGLVTTTHPYSIDLELEYNNNNNNNNNNNNNNNNNDNSYQFQEDWVHQWTPNIRFFRSHDYSRLHQYDIRAGSLALPVFERGTAMCLGVVEIFMPNNPDPDLHNVCHALQVITTIMSFIITLVNSFLILQFMIDEQGGVDFRSCSHQNLIPPAVTVKGLEELYQGALNEIVEVLTCVCKAHKLPLALTWAPCIQQGKSGCGHSKDENYVSTVDGGSYVADVEVLGFQEACSEYHLFGGQGVVGTAFTSTKPCFANDIRGFTKAEYPLAHHANMFGLHAAVAIPLKSVSGDFVLEFFLPKDCHDSQEQKQMLNSLSMLVQQACRSLHVVMEKEAEELALPVVMESSSWIADMMEAQAQAQAQAQAQTQQQHQHLHKGKGVSVSLEYLQEPKQEFKVTTNCNQQELGSVSVEGGGEESYGGRRGARKSGDKRRTKAEKTISLPVLRQYFAGSLKDAAKSIGVCPTTLKRICRQHGITRWPSRKIKKVGHSLRKLQLVIDSVQGAEGAIQIGSFYNSFPELSSASGVSESSKMNNDNNMFYSENGLYNQGQGQGQGQGTGFKSPTSSCSQTQTCNTMINNAGDIVMSEKQAVGASIQVQGDAQHFTHQYHHPILEAQPPLPLPLPLPLPLPLSLPQTSASVWNTATFRVKATFGDEKIRFSLQQNWGFRDLQMEIARRFNLNEISNVQLKYLDDAREWVLLTCDADLEECKDINRSSQTRTIRLFLFQASPLNHANTLGPTSPS

SEQ ID NO: 132 - protein, 679 aa, Mucuna pruriens
MEYGALVQNCAFGSLSECGSVSEEDLIEELLVEGCWVEASGVGSEVQYMASSEAEVGKRWWIGPKANPGPSSSVKERLVVAVGYLREYTKNANVLIQIWVPLRRGVGLGLGLVPDYHRNSDEPMSLNSNVNLRFFRCDEYPRLPYDVPGSLALPVFERGTATCLGVLQIVMPRLDTINYRPQLDNNNLCNINAFEAVDFRSCENLIIPGGVKVFEEAAVNEIVEVLTCVCKTHNLPLALTWAPCIQQGGKCGYGHWTENYVSSVDRACFVGDADLLGFQEACSEHHLFRGQGIVGTAFRTGKPCFAIDITAFTKAEYPLAHHASIFGLHAAIAIPLRSTVYTDFVLEFFLPKDCHDREHQKHLLSSLSLLLQQACRSLHVVVEDEFTLPPLLQTHKSESHGSWISHMMEAQAQAQAHQKGKGVCVSLEYLEEEPKEEFKVTTNCHWDSNYEAAQEQVFSDYGEESHTQTHTLGGGRRGRKSGEKRRTKAEKTISLQVLRQYFAGSLKDAAKSIGVCPTTLKRICRQHGITRWPSRKIKKVGHSLKKLQLVIDSVQGAEGAIQIGSFYSSFPELSTATCESSKSKAEIENPVPLKVKATFADEKIRFSLQPIWGFTDLQVEIARRFNLNEVRNVVLKYLDDEGEWVVLACDGDLEECKDLHTTSQSRTIRLALFQASPSS

SEQ ID NO: 133 - protein, 952 aa, Mucuna pruriens
MDHRVERRSSSFLGARTRVPKRNKRVGLCGSEDTDIILSGVFSFEKTRILRSVWEVRVAMMGDGGVTSSGTMMEAPPSDGTTSMDFDYMGELFLDGCWLEASADGSDFLLQSPSFSTPLFDPSFSWPALDTNHNESHETAFGTQQQSHNNIVNVAGSGSCSQQFQFETHSVEGASEGLRRWWFAPTPNPGPSIMEKLTRALMWIKDYNRNKDMLIQIWVPVHRRGRPILAANDLPFTFDSRSVNLAKYREISVGFEFSVEEGEGESKELLPGLPGRVFRDKVPEWTPDVRFFKSDEYPRVDHAQEYDVRGTLAVPVFEQGSKVCLGVIEVVMTTQHINYGPELESVCKALEAVDLRSSKHLSIQNVKACNRSYEAALPEIQELLRCACEMHKLPLAQTWVPCVQQGKEGCRHSEDNYLLCISPVEHACYVGDPSIRSFHEACTEHHLLKGEGVAGGAFMTNQPCFSDDITSLSKKAYPLSHHARLFRLRAAVAIRLRSIYNNTDDFVLEFFLPVDCNDSEEQRKMLTSLSIIIQRVCHSLRVIRNEELEEANLSVDEVITLADSGFARTAICEELQHKGMVASLDTEEKSSETMGRKFSDPRQQQESPILKGNLDSVRECSTSVEGNLSSVGISKMGERRRAKAKKTITLLVVRQYFVGSLKDAAKNIGVCTTTLKRICRQHGIKRWPSRKIKKVGHSLQKLQLVIDSVQGASGAFQIDSFYSNFPDLASPNLSGTSLFSSMNQSDNPNSISTQPEACASKSPSSSCSQSSISSHSCSSMSEPQHHTTNIAGNKDPMLDEDSADVVLKRIRSEAELKSLSGDNRAKLLPRSQSQETLGDHPKTQYQRPLLKTSSKVDAHRVKVTYGDEKTRFRMPKSWGYEDLLQEIGRRFNVSDMTKFDVKYFDDDSEWVLLTCDADLEECIDVCQSSETGTIKLCLQASSHSMRSSLEFR

SEQ ID NO: 134 - protein, 942 aa, Oryza sativa
MEQKPSPPPPPRSDEEEDGLMGCGMGGTGDIAGGDLDLMEEFLLATPGFDLSEFWHPGAASPFSPLFDIGSSVTTLTTPAPAAGEDDRDEAEMPSRGGGGLEVSPAHRGWTFQTAPQEVAVEPTVKERLRRALERIASQSQSQAQRGDGELLVQVWVPTRIGDRQVLTTCGQPFWLDRRNQRLANYRTVSMKYQFSADESARADLGLPGRVFVGRVPEWTPDVRYFSTEEYPRVQHAQYFDIRGSVALPVFEPRSRACLGVVELVMTTQKVNYSAEIENICNALKEVDLRSSDVSSDPRSKVVDASYRAIIPEIMDVLRAVCDTHNLPLAQTWIPCICQAKRGSRHSDESYKHCVSTVDEACYVRDCSVLGFHQACSEHHLFRGEGVVGRAFGTNEPCFSPDITTYSKTQYPLSHHAKLFGLRAAVAIQLRSVKTGSLDFVLEFFLPMKCINTEEQRAMLNSLSNTIQQVCYTLRVVKPKELVNDGPFEISQPTRPEFYAKSVHEDLDELCSGINVPGRTTSLEASEEVSSWIASLVDAQNKGGKGEIDVDLPFGFSKQDDEGFSVTAGWHTSPVMAPDGSMFSGFKRHEDYDVKENTCSSDPSNSNSDKAVEKRRTKTEKTVSLQDLRKHFAGSLKEAAKNLGVCPTTLKRICRQHGINRWPSRKIKKVGHSLKKLQMVIDSVHGPEGTVQLSSLYENFTKTTWSERELQGDVHFPASEQNFQLEPSVPDRPCEGRFTSHTSGSNSISPSCSQSSNSSLGCSSVPKTQQQHGSAPQLAVKEEISMDENQCSTLIKSASHAEAELQMFVEERPTMLFRSQSQVLLSEHKPIENMSNVQKARSDSLKIKAIYGEERCIFRLQPSWGFQRLKEEIVKRFGISQDTHVDLKYLDDESEWVLLTCDADLLECIDVYKSSSNQTVRILVNPSIQPLLNASFGQTGLS

SEQ ID NO: 135 - protein, 842 aa, Oryza sativa
MEEGDPQPSISLARTPSEGAAAAVDLDLLEQLLSADNAWLEVAANTSRSPNFFATPSNCLTDASVATTTPANSWWIQPSGASTSVRERFDQALAYIRETQSDADVLVQLWVPVKGNDGQLVLTTSGQPFTLDQRSNSLIQFREVSTKYQFSADVASGSSPGLPGRVFIGRLPEWSPDVRYFTSYEYPRINHAQYLDVHGTMGLPVFERGNYSCLGVIELIMTKQKLNFTSELNTICSALQAVNLTSTEVSSIPRAKLNSASYKDALPEILEVLRAACITHKLPLAQTWVTCAQQGKRGSRHSDENYKYCISTIDAACYVNEPRMQSFHEACSEHHLLRGQGVAGKAFTTNQPCFLPDIGSSTKLEYPLSHHAKIFNLKGAVAIRLRCTRTGIADFVLEFFLPTDCEVLEEQKAVLDSLSGTMRSVCQTLRVVTDKEMEDEAMREMNELNSFSPRGKNKVEELSFGDNTRGDREEASWTTLVGTSQKGSDLAELHTHGMLSHGGHGSSQAGDQTSKEGSKVKRRTKTEKTVSLQVLRQYFAGSLKDAAKSLGVCPTTLKRICRQHGINRWPSRKIKKVDHSLRKLQQIIDSVHGAETAFQLNTLYKDLTNTSVSSDNNLSGSVTVPLANQNNLDFEMHQHHRLSSNIPSTSLSHSSCSQSSDSSPSCSGGATKHSPQVGADQVRSGCLPQHSPVQTLQTEAASINEHFSGQEAPIDLLQDVAEKANGEQHMSQSPSSPKQTANVGMRVKVTFGSEKVRFRLKPECDFQELKQEISKRLSIADMNSLIVKYLDDDSEWVLMTCDADLHECFHVYKLADIQTIKISVHLAASPTTRITIGHTGFS

SEQ ID NO: 136 - skipped

SEQ ID NO: 137 - protein, 927 aa, Parasponia andersonii
MEDGVLSPATILGAPADYPMDLDFMDELFLEGCWLETRDGSEFLNQNPPSSNPLFDPLFWPTLEPDGESNANPSPKSNQEERHRSLFVESQGKSPLHTLPPTRATTDVVKYSGVSEAHITEGSSELSRRWWIGPKANPGPSSSVMERLWRALMYIKDVIRDKDILVQIWVPVHKEGRRVLTTRDLPFALDDSGSKLARYRDISVKYQFSAEEDSKDLVLGLPGRVFSGKVPEWTPDVRFFRNDEYPRLIHAQQIDVRGTLALPIFELDSRTCLGVVEIVMTTQKIKYRPELESVCKALEAVDLKSSEVLSTQNVYNEYYQAAIPEIQQVLRSACDTHRLPLAQTWVPCIYQGKEGCRHSDENYGQCVSTVDHACYALDPQVQSFHEACSEHHLFRGQGVVGLAFMTNQPCFSADITSYTKTEYPLSHHARMFRLQAAVAIRLRSIHASAADFVLEFFLPVDCKDPDEQKKMLTSLSLIIQQCCQSLRVITDKELEEESCSRVDEVVVPSNLRPARNTCFTEAPQNDTDLSLFPEEKKPREISDGRLSKLSDNQRDSSLKPSVECVEECSTVGEGSFSSVGVGKTGERRRAKAEKTITLQVLRQYFAGSLKDAAKSIGVCSTTLKRICRQHGIKRWPSRKIKKVGHSLQKLQLVIDSVQGASGAFQIDSFYTNFPELASPNVSGTSPFSTSKLNDHPLPSNMQPGDGGIFSVQAATAAATSKSSSSCSQSSSSSHCCSSRSQLHPQTWNNVTSSDDLIAGENSGGGDDVVLKRVRSEAGLNACSEDDRKLLPRSQSHKSLMKHHKTDKWFPPSSAKNNNNGARIPQQQGEFQRVKVTYGEDKTRFRMQNNWGFIDLQQEVGRRFGIQEMVKFTLKYLDDDSEWVLLTCDADLEECFEVYRSSQNATIKLSLQPSRHLYRGCLRGNDPL

SEQ ID NO: 138 - protein, 604 aa, Parasponia andersonii
MEDGCQSPPNSLMEACFGSAQNSGTSVTFVDLDKSDVYVDDDFFQDINASSFSLKPVTNPGSSFFLGAAASKMTSSGLSQQSFPTMEELNQYENTPRTLEPIGVENRNKNMLQLQADREGDPDCSAGGGGSITSEDGFYWRKYGQKQVVGSKYPRIYYKCMHLNCKVKKKVKRSDEGHITEILHSGVHNHHKPPNPRSAIGSSDSYSPATEKRCPPKNTLDLPQTNFKASSTENSQLDLTSSQKAEVQISLNRSISSDLLNSVAPIQPSYSNIVCDNQAAWPKIKELLKLACQRYRLPLAQTWVPCGHRLFDQDSNSNNDLWAYSISDQAFYARTILMQVFHDVCSEHYLLKGQGIVGEAFVTNKPRFSPDVTSYCKAEYPLTYHTKRLKFRSAVAIPAYWDGSIPPGDRTAPDFVVEFFLPLDCTDVEEQKNMVTSLKSLIALDLCIAAELELEQESGSKQDSDNGLIPRSVTNLTEGKFSSLAETDTSEEPRHKRCSMKRTDLLAGGLKDAEKKSTTRGKNSRSSRGKRDPTWKYCFPIEGNIHGVKCSFCKLVIQGGGITRFKLHLVSNDPSKNVKKCPNVPYEVKDEVENWIRRKDNKRK

SEQ ID NO: 139 - skipped

SEQ ID NO: 140 - protein, 927 aa, Parasponia rigida
MEDGVLSPATILGAPADYPMDLDFMDELFLEGCWLETRDGSEFLNQNPPSSNPLFDPLFWPTLEPDGELNANPSPKSNQEERHRSLFVESQGKSPLHTLPPTRATTDVVKYSGVSEAHITEGSSELSRRWWIGPKANPGTSSSVMERLWRALMYIKDVIRDKDILVQIWVPVHKEGRRVLTTRDLPFALDDNGSKLARYRDISVKYQFSAEEDSKDLVLGLPGRVFSGKVPEWTPDVRFFRNDEYPRLIHAQQIDVRGTLALPIFELDSRTCLGVVEIVMTTQKIKYRPELESVCKALEAVDLKSSEVLSTQNVFNEYYQAAIPEIQQVLRSACDTHRLPLAQTWVPCIYQGKEGCRHSDENYGQCVSTVDHACYALDPQVQSFHEACSEHHLFRGQGVVGLAFMTNQPCFSADITSYTKTEYPLSHHARMFRLQAAVAIRLRSIHASAADFVLEFFLPVDCKDPDEQKKMLTSLSLIIQQCCQSLRVITDKELEEESCSRVDEVVVPSNLRPARNTCFTEAPQNDTDLSLFPEEKKPREISDGRLSKLSDNQRDSSLKPSVECVEECSTVGEGSFSSVGVGKTGERRRAKAEKTITLQVLRQYFAGSLKDAAKSIGVCSTTLKRICRQHGIKRWPSRKIKKVGHSLQKLQLVIDSVQGASGAFQIDSFYTNFPELASPNVSGTSPFSTSKLNDHPLPSNMQPGDGGIFSVQAATAAATSKSSSSCSQSSSSSHCCSSRSQLHPQTWNNVTSSDDLIAGENSGGGDDVVLKRVRSEAGLNACSEDDRKLLPRSQSHKSLMKHHKTDNWFPPSSAKNNNNGARIPQQQGEFQRVKVTYGEDKTRFRMQNNWGFIDLQQEVGRRFGIQEMVKFTLKYLDDDSEWVLLTCDADLEECFEVYRSSQNATIKLSLQPSRHLYRGCLRGNDPL

SEQ ID NO: 141 - protein, 967 aa, Parasponia rugosa
MEYGAMMPSNAYGTSFSDATMEVDFMDQLLLEGCWDPAVAAAATGLNFTQPAAPCSSAPRSLIETSHYMPSFESSNTSSAHLITTHHHQIYQDHQETEEGSSDHLQENHSSESNNNNFFMNEANEVGKRLWIGPRPNPGTGPCSSVKERLTLAIDYLKECTRDRDVLIQIWVPIRRGGRQILTTYDQPYSLDPNCKSLASYRMVSREYQFLCEEDSAESVGLPSQAFLGKLPEWTPDVRYFRSYEYPRINYAKQYNVRGSLALPIFERGNGTCLGVVEIVMTTQKVNYRPELEYVCQALEAVDLRSSQNFSPPAVKVCDELYQAALSEIVEVLVSVCKIHRLPLALTWAPCHQQGKGGCRHSDENYTRCVSTVDLACFVSNLEILGFHEACSEHHLFRGQGIVGTAFTTNKPCFATDITAFSKTEYPLSHHARMFGLRAAVAIPLRSVYTSSSDFVLEFFLPKDCQDPEEQKQMLNSLSIVIQQACRSLHVVEKELEEEQIMLPIGDPAIVASSEGGLKLGTPTTATTTNTTTCPVGDQSSGKESSWVAHMMEAQQQGRGVSVSLDYLTEEPKEEFRVTTHWDNLNHGDLSNGQVFSDFGQLQQCSGSNGSIEGGIDSYSFGGRRSSGARKAGEKRRTKTEKTISLPVLRQYFAGSLKDAAKSIGVCPTTLKRICRQHGITRWPSRKIKKVGHSLRKLQLVIDSVQGAEGAIQIGSFYSSFPQLNSPKFQGNSNDSFSSISPSDHHHHHHHLNNQSNSQPESGFFIHGSAMKSSPSMSSQASGLQQSTTTFSCFNGDPLITEDPSVILKRACSSDEELFASNQDKANLLSRSQSYKALSDQNRILDQTLLPLPDNNERINLTDGFAFRVKANFGEKKIRFSLPPKCSFRDLQLEIMRRFALDDITMIDIKYLDDDREWVLLTCNADLQECLEIHRQSQNRTMRICLQQAPSDQLIEESPFGSSSSPC

SEQ ID NO: 142 - skipped

SEQ ID NO: 143 - protein, 927 aa, Parasponia rugosa
MEDGVLSPATILGAPADYPMDLDFMDELFLEGCWLETRDGSEFLNQNLPSSNPLFDPLFWPTLEPDGESNANPSPKSNQEERHRSLFVESQGKSPLHTLPPTRATTDVVKYSGVSEAHITEGSSELSRRWWIGPKANPGPSSSVMERLWRALMYIKDVIRDKDILVQIWVPVHKEGRRVLTTRDLPFALDDNGSKLARYRDISVKYQFSAEEDSKDLVLGLPGRVFSGKVPEWTPDVRFFRNDEYPRLIHAQQIDVRGTLALPIFELDSRTCLGVVEIVMTTQKIKYRPELESVCKALEAVDLKSSEVLSTQNVFNEYYQAAIPEIQQVLRSACDTHRLPLAQTWVPCIYQGKEGCRHSDENYGQCVSTVDHACYALDPQVQSFHEACSEHHLFRGQGVVGLAFMTNQPCFSADITSYTKTEYPLSHHARMFRLQAAVAIRLRSIHASAADFVLEFFLPVDCKDPDEQKKMLTSLSLIIQQCCQSLRVITDKELEEESCSRVDEVVVPSNLRPSRNTCFTEAPQNDTDLSLFPEEKKPREISDGRLSKLSDNQRDSSLKPSVECVEECSTVGEGSFSSVGVGKTGERRRAKAEKTITLQVLRQYFAGSLKDAAKSIGVCSTTLKRICRQHGIKRWPSRKIKKVGHSLQKLQLVIDSVQGASGAFQIDSFYTNFPELASPNVSGTSPFSTSKLNDHPLPSNMQPGDGGIFSVQAATAAATSKSSSSCSQSSSSSHCCSSRSQLHPQTWNNVTSSDDLIAGENSGGGDDVVLKRVRSEAGLNACSEDDRKLLPRSQSHKSLMKHHKTDKWFPPSSAKNNNNGARIPQQQGEFQRVKVTYGEDKTRFRMQNNWGFIDLQQEVGRRFGIQEMVKFTLKYLDDDSEWVLLTCDADLEECFEVYRSSQNATIKLSLQPSRHLYRGCLRGNDPF

SEQ ID NO: 144 - protein, 914 aa, Phaseolus vulgaris
MMRDGDVTSSSATMMEASPPDGTTTSMDFDYMGELFYDGCWFEASVDGSDFLLQSPSYSNPLFDPSFSWPALETNHNESQGAAFGTQEEGHNNNVVAARGGGGGGQQFQPETISIEGASDGVRRWRFAPTPSPAPGPSIMEKLVRALMRIKDYNRNKNMLIQIWVPVHRGGRPILAANDILFSLDSRSMNLAKYREISVRYEFSAEEGEVKELVPAEEGDSKELVLGLPGRVFRDKVPEWTPDVRFFRSDEYPRLDHAQEYDVSGSLAVPIFEQGSKMCLGVIEVVMTTQQINYGPELESVCKALEAVDLRSSKQLSIQNVKACNRSYEAVLPEIQQVLRSACEMHKLPLAQTWIPCVQQGKEGCRHSEDNYLFCISPAEHACYVGDPKIRSFHESCTEHHLLKGEGVAGGAFMTNQPCFSDDITSLSKKDYPLSHHARLFGLRAAVAIRLRSIYNSTDDFVLEFFLPVDCNDSEEQRKMLTSLSIIIQRVCRSLRVISDKELVEAKLSIDEGISLADSGFDRTAICEELQHKGTVASLDTEEKLSETTGRKFSDPMRQQKSPILKGNLDCVRESSTSVEGNLSSVGMSKMGDRRRAKAEKTITLQVLRQYFAGSLKDAAKNIGVCTTTLKRICRQHGIKRWPSRKIKKVGHSLQKLQLVIDSVQGASGAFQIDSFYSNFPDLASPNLSGTTLFSTFNQTDNPNSISTQPDPGALSPEGTSKSPSSSCGQSSISSHSYSSMSELQQLHTTNIAGKKDSTTAGEDSAVVALKRIRSEAELKSLNQDKAKLLPRSLSQETLGEHPKNQYQRPLLKTSSKVDAHRVKVTYGDEKTRFRMPKNWGYEDLLQEIGGRFNVSDMKKFDVKYLDDDCEWVLLTCDADLEECIDVCQSSESGTIKLSLQTSTHSMRSSLEFR

SEQ ID NO: 145 - protein, 822 aa, Phaseolus vulgaris
MEYGALVQNGACGSFSDIFAPETDFMDELFAEGCWVETRVGCGGSYLNCGTEPSKSNSCMEIIFEEESEAESLMVGKRWWIGPRANNPGPSSSVKERLVVAVGYLKEYAKNSNMVIQVWVPARRGCAVGIHQDSYTTLDYTNITNNNNGDATRVFQFQEEWLSDHWTPNIRFLRTHDYSRVQQYDLRAGSLSLPVFQRGSGICLGVVEILLPNNVNPDLHNLQGVDFRSYSLQNFIPPAMTVKGFDELYQGALNEIVEVLTCVCKAHELPLALTWAPCIQQGKSGCGHSNEENYVSTVDPASFVADVDVLGFLDACSEYHLLGGQGVVGTAFTTAKPCFANDITAFTKAEYPLAHYANMFGLHAAVAIPLRSVSADFVLEFFLPKDCHDTQDQKQMLNSLSMLVQQACRSLHVVMDKEEEEELVVHHHHHPHDSKEMESSSWIAHMMEAQQKGKGVSVSLEYLQEPKQEFKVTTNCSEQVFSELEGTGSVGVGVGGRRGGRKSGDKRRTKAEKTISLPVLRQYFAGSLKDAAKSIGVCPTTLKRICRQHGITRWPSRKIKKVGHSLRKLQLVIDSVQGAEGSIQIGSFYTSFPELSSANGVSESTKINNDNSKFYSENGLLSNQGVTTTTSTSPFKSPTSSCSQTCNPTSNQSTAIINNNNNNDDIILMSENQSLIGAPIQVQGEARHFTHHPPIPISIPIQSLDALPPLPQTNSVWNTGSGSFRVKATFGDEKIRFSLQPNWGFRDLQMEIARRFNLNEISNSQLKYLDDAQEWVLLTCDADLEECKDINRSSQSRTVRLFLFHASPLSHSTNAFGGTSPT

SEQ ID NO: 146 - protein, 725 aa, Phaseolus vulgaris
MEYGGGFGSLWECGSAWEEDSIEEVLVEGCWVEASGVGSCEGEYMGSSEAEMEMEVMRKRWWIGPEANSSVKERLVVAVGYIRECTKNSNVVIQVWVPLRSGLVGGPGNNLRRNHPDEWVSVEMNMNMNMNMNSARDVSLRFYRSHEYPRVPYYVDVPGSLALPVLERGTHTCLGVILILMPPCDTINYCPQVLNNSLLCNSSFQVFEEVYEAAVNEMAEVMKCVCRAQNVALALTWAPCCIQQGGKCGYGHSTETHFSTVERACFVGEAQALPFKEACSQHHLLRGQGIVGTAFTTSKPCFAVDIAAFSRAQYPLAHHANIFGLHAAVAIPLRTLYADFVVEFFLPKDCHDREHQNHFLNSISLLLQQSCRNLHVVMGDEFTLPPPPPPPPPPPQQYLSNKEEMVVSEKLESQWQAEACGSWIAHMMEAQAQEQKGKGVCVSLEYLEEAKEEFKVTGKCRWESGGGGAYEAADLHEQQVFGDESQTQTQSFGGRRGRKSGEKRRTKAEKTISLPVLRQYFAGSLKDAAKSIGVCPTTLKRICRQHGITRWPSRKIKKVGHSLKKLQLVIDSVQGAEGAIKIGSFYNSFPELSSATSHSSIPNNSSSFYGHSPPSSSSPSTAPPQHQHFSQTSCTAAPLRVKASFGDEKIRFSLQPKWGFRELEVEIGRRFNVKDLGKVVVKYLDDEGEWVVLACDGDLEECKDLHTTYESRTIRLALFQPSSSP

SEQ ID NO: 147 - protein, 922 aa, Pisum sativum
MEYGGGIVDDGGVFGTMVGGDQGDIIEELLGEGCWIEASENNMMAMQQTASPPQQHYIGNNIPIGMGEGDHFNHHQVDQESGFVVGKRWWIGPRGSQGPSTSVKERLVVAVGYLKEYTKNSSNNVLIQIWVPALRRRSAIHYLQQDSSSSVPVSVNPNMNVHVRFFRSHEYPRHQQQQQQYGSLLALPVFERGSGTCLGVIEFVIANQNLINYRPQLDHLSNALEAVDFRSSHNMNIQPAVKVIFEELYEAAVNEIVEVLASVCKTHNLPLALTWAPCIQQQGGGKGTTGGGGCSVSVTVPTDQMNNNNHMMMSCISTVDSACYVGDMEVLGFQEACSEYHLFNGQGIVGTAFTTTKPCFAIDITAFSKAEYPLAHHADMFGLHAAVAIPLRSVYTGSAADFVLEFFLPKDCRDTEQQKQMLNSLSLVVQQACRSLHLHVVMEDDNANHHEDQDQFTFPTTTNNYMPSSASDAATTASLSQVDAASGCSTKDTTSSSCSWIAHMMEAQNKGKGVSVSLEYLQEPKEEFKVTTCNWEREGNSVFSEFGQVIQHDQSSNSRASVEAGEESGGGGTGGGRRSSSSSSGRKSGDKRRTKAEKTISLPVLRQYFAGSLKDAAKSIGGCPTTLKRICRQHGITRWPSRKIKKVGHSLKKLQLVIDSVQGAEGAIQIGSFYASFPELSTAAAHGGGGGGDHINNNSFYNSHGDLVTNLKSPPSACSQTHAAGNKSIINGDHHHHHHQHLVMTENLAAPSAVDALMQHASTINIQDYQQLQEDHDTKQLLLHFNNNNNNSNNQTLPPRPTVTWNNNNSSSSGLLERGAFRVKATFADEKIRFSLQAVWCFRDLQLEIARRFNLNDMNNLVLKYLDDEGEWVVLACDSDLEECKDLHTSSHTRTIRLSLFQASPLNNLANSFRNNSSSPSS

SEQ ID NO: 148 - protein, 924 aa, Pisum sativum
MEYGGGIVDDGGVFGTMVGGDQGDIIEELLGEGCWIEASENNMMAMQQTASPPQQHYIGNNIPIGMGEGDHFNHHQVDQESGFVVGKRWWIGPRGSQGPSTSVKERLVVAVGYLKEYTKNSSNNVLIQIWVPALRRRSAIHYLQQDSSSSVPVSVNPNMNVHVRFFRSHEYPRHQQQQQQYGSLLALPVFERGSGTCLGVIEFVIANQNLINYRPQLDHLSNALEAVDFRSSHNMNIQPAVKVVFEELYEAAVNEIVEVLASVCKTHNLPLALTWAPCIQQQGGGKGTTGGGGCSVSVTVPTDQMNNNNHMMMSCISTVDSACYVGDMEVLGFQEACSEYHLFNGQGIVGTAFTTTKPCFAIDITAFSKAEYPLAHHADMFGLHAAVAIPLRSVYTGSAADFVLEFFLPKDCRDTEQQKQMLNSLSLVVQQACRSLHLHVVMEDDNANHHEDQDQFTFPTTTNNYMPSSASDAATTASLSQVDAASGCSTKDTTSSSCSWIAHMMEAQNKGKGVSVSLEYLQEPKEEFKVTTCNWEREGNSVFSEFGQVIQHDQSSNSRASVEAGEESGGGGTGGGRRSSSSSSGRKSGDKRRTKAEKTISLPVLRQYFAGSLKDAAKSIGGPTTLKRICRQHGITRWPSRKIKKVGHSLKKLQLVIDSVQGAEGAIQIGSFYASFPELSTAAAHGGGGGGGDHINNNSFYNSHGDLVTNLKSPPSACSQTHAAGNKSIINGDHHHHHHHQHLVMTENLAAPSAVDALMQHASTINIQDYQQLQEDHDTKQLLLHFNNNNNNNSNNQTLPPRPTVTWNNNNSSSSGLLERGAFRVKATFADEKIRFSLQAVWCFRDLQLEIARRFNLNDMNNLVLKYLDDEGEWVVLACDSDLEECKDLHTSSHTRTIRLSLFQASPLNNLANSFRNNSSSPSS

SEQ ID NO: 149 - protein, 921 aa, Pisum sativum
MEYGGGIVDDGGVFGTMVGGDQGDIIEELLGEGCWIEASENNMMAMQQTASPPQQHYIGNNIPIGMGEGDHFNHHQVDQESGFVVGKRWWIGPRGSQGPSTSVKERLVVAVGYLKEYTKNSSNNVLIQIWVPALRRRSAIHYLQQDSSSSVPVSVNPNMNVHVRFFRSHEYPRHQQQQQQYGSLLALPVFERGSGTCLGVIEFVIANQNLINYRPQLDHLSNALEAVDFRSSHNMNIQPAVKVFEELYEAAVNEIVEVLASVCKTHNLPLALTWAPCIQQQGGGKGTTGGGGCSVSVTVPTDQMNNNNHMMMSCISTVDSACYVGDMEVLGFQEACSEYHLFNGQGIVGTAFTTTKPCFAIDITAFSKAEYPLAHHADMFGLHAAVAIPLRSVYTGSAADFVLEFFLPKDCRDTEQQKQMLNSLSLVVQQACRSLHLHVVMEDDNANHHEDQDQFTFPTTTNNYMPSSASDVATTASLSQVDAASGCSTKDTTSSSCSWIAHMMEAQNKGKGVSVSLEYLQEPKEEFKVTTCNWEREGNSVFSEFGQVIQHDQSSNSRASVEAGEESGGGGTGGGRRSSSSSSGRKSGDKRRTKAEKTISLPVLRQYFAGSLKDAAKSIGVCPTTLKRICRQHGITRWPSRKIKKVGHSLKKLQLVIDSVQGAEGAIQIGSFYASFPELSTAAAHGGGGGGDHINNNSFYNSHGDLVTNLKSPPSACSQTHAAGNKSIVNGDHHHHHHQHLVMTENLAAPSAVDALMQHASTINIQDYQQLQEDHDTKQLLLHFNNNNNNSNNQTLPPRPTVTWNNNNSSSSGLLERGAFRVKATFADEKIRFSLQAVWCFRDLQLEIARRFNLNDMNNLVLKYLDDEGEWVVLACDSDLEECKDLHTSSHTRTIRLSLFQASPLNNLANSFRNNSSSPSS

SEQ ID NO: 150 - protein, 924 aa, Pisum sativum
MEYGGGIVDDGGVFGTMVGGDQGDIIEELLGEGCWIEASENNMMAMQQTASPPQQHYIGNNIPIGMGEGDHFNHHQVDQESGFVVGKRWWIGPRGSQGPSTSVKERLVVAVGYLKEYTKNSSNNVLIQIWVPALRRRSAIHYLQQDSSSSVPVSVNPNMNVHVRFFRSHEYPRHQQQQQQYGSLLALPVFERGSGTCLGVIEFVIANQNLINYRPQLDHLSNALEAVDFRSSHNMNIQPAVKVFEELYEAAVNEIVEVLASVCKTHNLPLALTWAPCIQQQGGGKGTTGGGGCSVSVTVPTDQMNNNNHMMMSCISTVDSACYVGDMEVLGFQEACSEYHLFNGQGIVGTAFTTTKPCFAIDITAFSKAEYPLAHHADMFGLHAAVAIPLRSVYTGSAADFVLEFFLPKDCRDTEQQKQMLNSLSLVVQQACRSLHLHVVMEDDNANHHEDQDQFTFPTTTNNYMPSSASDAATTASLSQVDAASGCSTKDTTSSSCSWIAHMMEAQNKGKGVSVSLEYLQEPKEEFKVTTCNWEREGNSVFSEFGQVIQHDQSSNSRASVEAGEESGGGGTGGGRRSSSSSSGRKSGDKRRTKAEKTISLPVLRQYFAGSLKDAAKSIGVCPTTLKRICRQHGITRWPSRKIKKVGHSLKKLQLVIDSVQGAEGAIQIGSFYASFPELSTAAAHGGGGGGGDHINNNSFYNSHGDLVTNLKSPPSACSQTHAAGNKSIINGDHHHHHHHQHLVMTENLAAPSAVDALMQHASTINIQDYQQLQEDHDTKQLLLHFNNNNNNNSNNQTLPPRPTVTWNNNNSSSSGLLERGAFRVKATFADEKIRFSLQAVWCFRDLQLEIARRFNLNDMNNLVLKYLDDEGEWVVLACDSDLEECKDLHTSSHTRTIRLSLFQASPLNNLANSFRNNSSSPSS

SEQ ID NO: 151 - protein, 922 aa, Populus trichocarpa
MEDGGLSPGTMLGATVDSVSVMDFDYMDELLLEGCWLETTDGSEFLNPSLSNSAAFFDSSFMWPTPEINHGDSASSPSQKGNQEDNQISMFPGNSTLSDIQARSPAGETAVSVAGWDDNATDGSELGKRWWIGPTPNPSVETSVKRRLIKALECIKDLTKNKDVLIQIWVPVNRGGRRVLTTHDQPFSLDPSSEKLASYRDISVKYQFSAEEDSKDSVGLPGRVFLGKVPEWTPDVRFFRSDEYPRVNHAQLYDVRGTLALPVFEQGSRTCLGVIEVVTTSQKIKYRPELESVCKALETVDLRSSEVPSIQNLQACNMSYQAALPEIQKLLRAACETHRLPLAQTWVPCTQQGKGGCRHSNENYYRCVSTVDDACCVADSAIQGFQEACSEHHLLKGQGVAGQAFMTNQPCFSGDVTSYGKTEYPLSHHARMFGLCAAVAIRLRSIYIGTTDFVLEFFLPVNCRDPQEQKKMLNSLSAIIQHVSQTLRVVTDKELVEETDLPFSEVLVPSDGRSSGEETSTVKQSCSERHSRDNSPWTACLSEVQPSGSNISLSQKDKQKVMLREKSSENRENQEDCSLRESIKCGRDSTSAEGSFSSAGTSKTGEKRRAKAEKTITLQVLRQYFAGSLKDAAKSIGVCPTTLKRICRQHGINRWPSRKIKKVGHSLKKLQRVIDSVEGASGTVQIDSFYKNFPELASPTLSRTSPLSTLKSSSHPKPSGMQPEGGTFSSQVTAPKSPSPSCSLGSSSSHSCSSGAIAASEDPVSGENSGNGVLKMVRSNVELHASSPGEQERMPRSQSHKTLAELGSIPPLSKDGSRLSQETDAHRLKVTYGNEIIRLRMSNKWGFKDLLQEIVRRFNIDDIHRFDLKYLDDDSEWVLLTCDDDLEECIAICGSSDNQTIKLLLEVSPRPLGRSSHSSGLS

SEQ ID NO: 152 - protein, 925 aa, Populus trichocarpa
MDDGNGPNFIPDSAFENFSGSSMDLDFMDDLLYEGCWLETADEFNFLQAGTISSSDLNDPRQYFPLFEPNSSNSNVNSHQENYQDQSGSFPVESNELGRRLWIAPTATGPSSPVRDRLMHAIGQVKECTKDRDVLIQIWVPVKKEGKNVLTTIGQPYLLDRKCQSLASYRNVSKDFQFPADEDSKELVGLPGRVFLRELPEWTPDVRFFSGVEYLRKNHAKQFNIRGSLAVPVFEQGSRTCLGVIEVVTTTRDISYRPDLENVCKALEAVDLRSPQDFCPPSLKAKVCQAAAPEISKILESVCKAHRLPLALAWAPCFREGKGGCRHFDESYSYFISLVNSAYFVAERDDWGFYMACSEQYLSFGHGIVGRAFATNKQCLSTDVAAFSKTDYPLSHHAKMFGLHAAIAIPLQSSYAGSADFVLELFLPKDCRNTEEQKQMWDILPITVQQACQSWHVIMDKELEETVNKKMVVASDERFHKDESQKFASSLFKDSSKAESSWIARTVEAQQKGKGVSVSWDHTKEEPREEFKVKSQWGRTQDDTYHKQAFPAFGQFQQNSGPKSSIEAGTDSSSAGRHSLGSIKFGDKRRTKTEKTISLEVLRQHFAGSLKDAAKSIGVCPTTLKRICRQHGITRWPSRKIKKVGHSLKKLQLVIDSVQGAEGAIQMGSFYATFPELTSPNLSGNGGLPSTKTDENFKQLNPQPESGIFSAAPSALKSPSSSCSHSSGSSICCSIGVKQDTTTNNGSVSGDPLMVEDHGDVLKRTHSDAELHALNRDETKLLVRSQSHKTFGDLPSPKTLPPLPKSSSRVIRDGGGFRVKATFGADKIRFTLQPNWGFRDLQQETARRFNLDDISGIDLKYLDDDLEWVLLTCDADLEECRDVYKLSEIHTIKISLHQPAQPHLGSSLESRGPHLGSSLGTGVPF

SEQ ID NO: 153 - protein, 915 aa, Populus trichocarpa
MEDGVLSPGMMLGAAVDSAMDFDYMDELLLEGCWVETTDGSEFLNPSLSNSAALFDPSFMWPSPEMNNGNPASSLSQKGSQEVSHIPLLPGNSPSDIQSRSPVGEIAVSAAGWEYNATEGSELGKRWWIGPAPNPSPGTTVKRRLIKAVECIKDLTKNKDVLIQIWVPVNRGGRRVLTTHDQPFALDPSSERLASYRDISVKYQFSAEKDSKDSVGMPGRVFLGKVPEWTPDVRFFRNDEYPRVNHAQQCDVRGTLALPVFEQGSRTCLGVIEVVTTSQKIKYLPELESVCKALEAVDLRSSEVPSIQNLKACDMSYQAALPEIQKVLRAACETHRLPLAQTWVPCIQQGKGGCRHSNENYYHCVSTVDDACCVGDPAFQGFLEACSEHHLLKGQGVVGEAFMTNQPCFSGDVTLYGKTEYPLSHHARIFGLCAAVAIRLRSMYTGTTDFVLEFFLPVDCRDPQEQKTMLTSLSIIIQRVCQTLRVVTVKELEEETDLPVSEVLVPSDGRSSGEETSTVKESYSERNARDNSPWTACLLKVQQSESNASLSEKDKEKVMCEKSFESRHNQEDYSLRGSTKYGGDSTSAEGSFSSVCKTKPGEKRRAKTEKTITLQVLRQYFAGSLKDAAKSIGVCPTTLKRICRQHGINRWPSRKIKKVSHSLQKLQCVIDSVEGAPGSVQIGSFYENFPELASPNSSRNSSLSTLNPSSHPKPSGIQLEGGTFSSHVAEPKSPSPSCSLSSSSSHSYSSTTQQYPSAITVSASEDPKLGENLGSGVLKKIRSNAELHASILEERKLMLRSQSHTTLTELGNRPPLPKDSSRLSQEMDGHRVKVSFRNDKIRLRMPNNWVFKDLLQEIIRRFNLDDMHRYDLKYLDDDSEWVLLACDDDLEECIDVCGSGDNQTIKLLIEVSPHP

SEQ ID NO: 154 - protein, 904 aa, Populus trichocarpa
MDDHGSSTPNSTFDIFSGNVTNWDFMDEILYQGWFEKDGGFNFLQQGLSTSNVLHDPSLYFPVTGTTNWNSVETSTPFSHPASCRVEAAGLGFEWQMVQRVNPGTSCSVKERVMQAVGYLKNCIQDRDILIQIWLPMEKEGKRVLATIDQPYFVDPSCKSLASYRKVSTAYHFQAEEDAKCSVGFPGRVFLEKLPEWTPDVRLFRSEEYPHRDHAVQHNIRGSLALPLFKQGSETCLGIVEIATTIQKISYRSELQDICKVLQAVDLRSSEDFCSPGVEITIVFLLSQTCNRLNRAAVPEISDIVKSVCKTYSLPLALTWALCSRQGKIGRQQFPERFSSCISTVDSACFLADRGFSGFHMASFEQYLFLGQGIVGRAFTTQKQCFTNDITSFSKKDYPLAHHAKIFGLHAAIAIPLRSISTGLVEFVVELFLPKDCQETEEQKKMWDLLPIVLKQVCRSLQIVMDKELHIGENKSFESSPSKEAPPDESSWIASMLEAQKKGKSCIVTWDYPKEPEEEFKTIIHWDDSAVEIDQKQVISELGRLQQHSRPNINIEGDGVSFAFGGRRSLGSTKAGKKRRTKTEIQTISLGVLRQYFAGSLNDAAQSIGVCPTTLKRICRQHGIKRWPSRKIKKVDHSLRKLQQVIDTVQGAKGAVQIESFYPAFPELSSPKLSNHTSYSSFRRIDNSKHLDSPPDDSCPSGTASKSHSSPCSRSSCSSNCCSGRAQQHAATTITGSSNGNGSLLAETSNGIFKRTCSNELAELHSLNNQGGPDFLVRSQIHKTRTVSDHIHQNELESPPRFGPSLREGGVFGVKAIYGVEKVRLGLQPKWGLRDLQQEIGKRFEIDDFTCIGLKYMDDDGEWVLLTCDSDLEECKEIHRFSQTNTIKISLHKYSSPFGFRGSF

SEQ ID NO: 155 - protein, 793 aa, Populus trichocarpa
MLTETSTPFAHPASCRVEAAGLGFEWQMVQRVNPGTSFSVKERVMQAVGYLKHCIQDRDILIQIWLPMEKEGKRDAKRSVGFPGRVFLEKLPEWTPDVRLFRSEEYPHRDHAVQHNIRGSLALPLFTQGSETCLGIVEIATTIQKISYRPELQDICKVLQAVDLRSSEDFCSPGVETCNRLNRAAVPEISDIVKSVCKTYRLPLALTWALCSRQGKSGRQQFPERFSSCISTVDSACFLADRGFSGFHMASFEQYLFLGQGIVGRAFTTQKQCFTNDITSFSKKDYPLAHHAKIFGLHAAIAIPLRSISTGLVEFVLEFFLPKDCQDTEEQKEMWDLLPISIKQVCWSLQVVMDKELDQGENQSFVSSPSKEPPRDESSWIAWMVEAQKKGKSCCITWDYPKEPKEEFKMITPWDDSEEELDNKQVISELGQLQQNPRPNSCIEGDGVSSAFGGCRSLGSRKTGKKRRTKTAIQTISLEVLRRYFAGSLKDASQSLGVCSTTLKRICRQHGIKRWPSRKINKVGHSLRKLQQVIDTVQGAKGAVQIESFYSAFPELSSPKISSHAPYSSLRSDNSKHLDSPPDDSSPSGTASKSHSSPCSGKSCSSNCCSARAQQHDATTITVSSNGNGALLAETSNGILKRTCSSELAEFHSMNNHGDPDFLVRSQIHKTRTVSGHIHQSELGSPRFAQSLREGGVFGVKAIFGVEKVRLGLQPNWGLRDLQQEIGKRFEIDDFTDIGLNYMDDNGEWVRLTCDGDLEECKEIHIFSQRNTMKISCHDPNLVSMTSNTGATL

SEQ ID NO: 156 - protein, 903 aa, Populus trichocarpa
MDDGNGAFAPDSSFGNFSDAAMDLDFVDELLYDGCCFETVDEFGFLEAGTSASNDLNDPKQYLPFFESNSCNLNVNPCQENYQVATEKNFQSGGFLVEKNELGRRLWIAPTNNARSSTGVRERLMHAIGQLKQCTKDRDLLIQIWVPIKKEGKHVLTTFGQPYLLNPKSQSLASYRNVSKKFQFPAEEDSKELVGLPGRVFLRKLPEWTPDVSYFSWVEYPRKNHAKQFNIRGSFAVPVFEQGSRTCLGVIEVVTTTQDVSYRSELESVCKALEAVDLRSPKDFRPSSLKACKEFCQAAVPEISKILESVCKTHRLPLALTWAPCFRQGKGGCRHFDENYSNCICTVNSACFVAETDNFGFYVACSEQYLSFGQGIVGRAFTTRKQCFSTDVAAFSKTDYPLSHHAKMFELHAAIAIPVQSTYAGPVDFVLEFFFPKDCCNTEEQKRMWDILPITIKQACWSLHVVMDKELEETVNKKMKFASLFKESSEAESSWIARVAEAQQKGKGVCVSWDHRKEENKEEFKVTSHWGKTQDELYHKQAFPEFGKFQQNSVPKGSIESTTDAASAEHHSVGSRKSGDKRRTKTEKTISLQVLRQYFAGSLKDAAKSIGVCPTTLKRICRKHGITRWPSRKIKKVGHSLKKLQLVIDSVQGAEGAIQIGSFYTTFPELTSPNFSANGGFPSSKANDDSNKSNHRPENGIFSAAASASKSPSSSSSQSSGSSICFSGYPLLVEDPGGVLKRTHSDAALHALNRDKSEPLIRSQSFKTFGDLPNPETLPPLPKSSSQIIRDRSGFRVKATFGADKIRFTLQPNWGFRDLQQEIARRFNIDDICRIDLKYLDDDQEWVLLTCDADLEECKDVYKLSESHTIKMSLNQPSQPHLGSSLGSVGPNLVSLLGGGGPF

SEQ ID NO: 157 - protein, 935 aa, Populus trichocarpa
MDEHSSSSPNSTFGIFSGNPMNWDLMDEILYQGWAENDGEFSFLQQGPSISNVLYDHPSLYMPFMGSNNLSIASNQQNYQEETERHCHGNPPLDYPKSMELLQTEPQVEDSVDTSTSLLHTTSYRVEAAGLGVEWQMVPRVNPLTSFSVKERAMQAIRYLKNCIQYKDSLIQIWLPVEKEGKKVLATIDQPYFVNPSCKSLASYRNVSVAYHFQVEGDAKFSVGFPGRVFLEKLPEWTPDVRLFRSEEYPRRDHAVQHNIRGSLALPLFKQGSETCLGIVEIVTTTEKITYRPELEDIRKALKAVDLRSSEDFCSPGVKTCNGLNQVAVPELSEIVKSVCKTYGLPLALTWALCSRQGKGGRQQFAEKSGACISTVDSACFLADRDFSGFHMASFEQYIFLGQGIVGRAFTTQKQCFANDITSFSKKDYPLAHHAKIFGLHAAIAIPMRSIATGLVEFVLELFLPIDCKDTEEQKKMWDLLPIAIQQVCWSLQVVMDKGLGNGENQSFESSPSKQPPLDESSWISRMVEAQKKSKSFCVTWGYPKEPKEEFKMITHWDESAVELDHKQVISELGQLQQNSRTNSNTEGDGVSSAFGRHLSFGSRKTGKKRRTKTDIQTISLEVLRQYFAGSLKDAAQSLSVCPTTLKRICRQHGITRWPSRKIKKVDHSLRKLQQVIDTVQGAKGAIQIESFYSAFPELSSTKLSSHAPSSSFRRSDSSKHFDSPPDDTIFSGTTSKSHSSPCSRSSCSSNCCSARAQQHAATVITGSSNGNGGLPAETSNGVLKRTSSSELAEFYSLNNEVEPDFLSRSYIHKTRTINEQIHQSLLETPPQFGQSRRGGDVFRVKAIFGVEKVRLFLQPNWGLRELQQEIGKRFKIDDFTGIGLKYMDDDGEWIRLTRDDDLEECKETHKFCQSNTIKLSLYKYSTAFGCRGSC

SEQ ID NO: 158 - protein, 854 aa, Prunus avium
MSPHQQIYQEENTDGSYPESHSSFAVEGNTEADRRLWIGPRVNPGPSSSMKERLMLAIGYLKECTKGRDVLIQIWVPIKRGGRQYLTTRDQPFSLDPNCKSLAGYRNVSKDYQFITEEDSAESVGLPGRAFLGKLPEWTPDVRFFRSYEYPRIDYAQQYDVRGSLALPIFENGSGTCLGVVEIVMTPQKVNYRPELEYVCQALEAVDLRSSQNFCPHCVKTCDELYQAALTEIVEVLASVCKTHRLPLAQTWAPCIQQGKGGCRHSDENYAHCVSTVDAACFVADLDILGLHEACSEHHLCRGQGIVGAAFTTNKPCFATDIKAFSKTEYPLSHHARMFGLHAAVAIPFRSVCTGPADFVLEFFLPKDCQDPEEQKQMLNSLCIVIQQACWSLHVDVDKELEEEIMFPIREPVIGSDGGLHEEETQRLISSPTEEPSGKESSWIAHMIEAQQKGKGVSVSLDYQTEEPKEEFKVTTHWDNTQGSLHSGQVFSEFGQLHQSSGSHGNVEGGADSYSFGGRRTSGGRKAGEKRRTKTEKTISLPVLRQYFAGSLKDAAKSIGVCPTTLKRICRQNGITRWPSRKIKMVGHSLKKLQLVIDSVQGAEGAIHIGSFYSSFPELNSPKFPGSGQYSSMNMSDHSKQVNPLQHDQSGLYSHGTTTKSPSSSCSQTSGPSVCVAGAQQHTVTINTLSSGDALMTEDPVGVLKRACSDADLHASFQEETKLIYRSESHKSFSDNLSYENLPPLPGSSGRSLRDGLQSKSYFGMKKIRFSMLPNCSFRDLQLEIARRFNLDDISRTEIKYLDDDREWVLLNCDADLEECMEIYSSSPGRTVRLCLQQVFHPNLAASFGNSSPS

SEQ ID NO: 159 - protein, 913 aa, Prunus avium
MDDDVLSPATMMGAQPDSATDLDFMDELFLEGCWLETTDGPEFPNQSHANSGAHLNPSVFWHTLEANGNLTMNPSENSNQEVIQTPFFKQLHKGPVNPQFPSQNMIDVDGYSGHSADPTIKSYELNRRWWIGPLENQGPASSVMERLTRALVCIRDVMRDKNVLVQVWVPVNKGGRNVLTTNDDLFSLNSSCPRLSKYRDISVNYQFSTGEDSTELVKGLPGRVFSGQVPEWTPDVRFFRSDEYPRVDYAQRYDVRGTLALPIFEQGSRTCLGVIEVVTTTQKTKYQLELESVCKALEDVDLQSSRNWRTQNIKQGCVKPYQAALPEIQEVLKSACETHKLPLAQTWVSCIQQGKDGCRHSDDNYIHCVSTLDHAFHVTDPYIEDFHEACSEHHLLKGQGIVGKAFMTNQPCFSDDITSCVKTEYPLSHHARMFGLHAAVAIRLRSMKTGSTDYVLEFFLPVECRDPEEQKKMLNSLSLIIQQICRSLRVVTDKELEEESDFPVSEMLVSSDPRPSGIASFTEVQLSGNDVSIFPMENPREVLGVKSSKLRQHQPESNLKGGVECGTECSTLGEGSFSSVGVSKTREKRRTKAEKAITLEVLRKYFSGSLKDAANSIGVCSTTLKRICRQHGIKRWPSRKIKKVGHSLQKLQLVIDSVEGASGAFQINSFYTNFPELTSPNLSGTSPFSTSKLSDQPKPTNLSPEGGVVSPQATASKSPSSSCSQSSSSSQCCSSRTQQHPPTCNVTGDDDPIVGDNSGDGVLKRVRSEAELHAFGQDRTQLLPRSQSHKILNELQKLQPIPPSLKNNGVAQEGEVQRVKVAYGDEKTRFRMRSDWRYEDLVQEIAKRFSIEDMSIFDIKYLDDDSEWVLLTCDADLEECIDVCRSSQSHTIKLSLHLSRHHLRRFIGINGPS

SEQ ID NO: 160 - protein, 912 aa, Prunus avium
MDDDVLSPATMMGAQPDSATDLDFMDELFLEGCWLETTDGPEFPNQSHANSGAHLNPSVFWHTLEANGNLTMNPSENSNQEVIQTPFFKQLHKGPVNPQFPSQNMIDVDGYSGHSADPTIKSYELNRRWWIGPLENQGPASSVMERLTRALVCIRDVMRDKNVLVQVWVPVNKGGRNVLTTNDDLFSLNSSCPRLSKYRDISVNYQFSTGEDSTELVKGLPGRVFSGQVPEWTPDVRFFRSDEYPRVDYAQRYDVRGTLALPIFEQGSRTCLGVIEVVTTTQKTKYQLELESVCKALEDVDLQSSRNWRTQNIKGCVKPYQAALPEIQEVLKSACETHKLPLAQTWVSCIQQGKDGCRHSDDNYIHCVSTLDHAFHVTDPYIEDFHEACSEHHLLKGQGIVGKAFMTNQPCFSDDITSCVKTEYPLSHHARMFGLHAAVAIRLRSMKTGSTDYVLEFFLPVECRDPEEQKKMLNSLSLIIQQICRSLRVVTDKELEEESDFPVSEMLVSSDPRPSGIASFTEVQLSGNDVSIFPMENPREVLGVKSSKLRQHQPESNLKGGVECGTECSTLGEGSFSSVGVSKTREKRRTKAEKAITLEVLRKYFSGSLKDAANSIGVCSTTLKRICRQHGIKRWPSRKIKKVGHSLQKLQLVIDSVEGASGAFQINSFYTNFPELTSPNLSGTSPFSTSKLSDQPKPTNLSPEGGVVSPQATASKSPSSSCSQSSSSSQCCSSRTQQHPPTCNVTGDDDPIVGDNSGDGVLKRVRSEAELHAFGQDRTQLLPRSQSHKILNELQKLQPIPPSLKNNGVAQEGEVQRVKVAYGDEKTRFRMRSDWRYEDLVQEIAKRFSIEDMSIFDIKYLDDDSEWVLLTCDADLEECIDVCRSSQSHTIKLSLHLSRHHLRRFIGINGPS

SEQ ID NO: 161 - protein, 942 aa, Prunus avium
MDYGALMPNSSSYGTLSDTTMEVDFMDEILFEGCWLQSNAGFNLLQQQQQQLVCPPISQDLTDHPSHYFPPYDHQSNSTVAHLSMSPHQQIYQEENTDGSYPESHSSFVVEGNTEAGRRLWIGPRANPGPSSSVKERLMLAIGYVKECTKGRDVLIQIWVPIKRGGRQYLTTHDQPLSLDPNCKSLAGYRNVSKDYQFITEEDSAESVGLPSRAFLGKLLEWTPDVCFFRSYEYPRIDYAQQYDVRGSLALPIFENGSGTCLGVFEIVMTPQKVNYRPELEYVCQALETVDLRSSQNFWPLCVKTRDELFQAALTEIVEVLASVCKTHRLPLAQTWALCIQQGKGGCRHSDENYAHCVSTVDAACFVADLDILGFHEACSEHHLFQGQGIVGTAFTINKPCFATDIKAFSKTEYPLSHHARMFGLHSAVAIPFRSVYTGPADLVLEFFLPKDCQDPEEQKQMLNSLCIVIQQACRSLHVNVDKELEEEIMFPIREPVIGSDGGLHKEETQRLISSPTEEQSGKESSWIAHMIEAQQKGKGVSVSLDYQTEEPKEEFKVTTHWGNTQGSLHSGQVFSEFGQLHQSSGSHGNVEGGADSYSFGGRRTSGGRKAGEKRRTKTEKTISLPVLQQYFAGSLKDAAKSIGVCPTTLKRICRQHGITRWPSRKIKMVGHSLKKLQLVIDSVQGAEGAIDIGSFYSSFPELNSPKFPGSGQYSSMNMSDHSKQVNPQQHDQSGLYSHVTTTKSPSSSCSQTSGPSVCVAGAQQHTITINTLGSGDALMTEDPVGVLKRACSDADLHASFQEETKLIHRSQSHKSFSDNLSYENLPPLPLPGSSGRSLWDGGIYRVKATFGMKKIRFSMLPNCSFRDLQLEIARRFNLDDISRTGIKYLDDDCKWVLLNCDADPEECMELYSSSPGRTVRLCLQQVFHPNLAASFGNRSPS

SEQ ID NO: 162 - protein, 911 aa, Prunus avium
MDDDVLSPATMMGAQPDSTTDLDFMDELFLEGCWLETTDGPEFPNQSHANSGAHLNSSVFWHTLEANGNLTMNPSENSNQEVIQTPFFKQLHEGPVNPQFPSQNMIDVDGYSGHSADPTIKSYELNRRWWIGPLGNQGPASSVMERLTRALVCIRDVMRDKNVLVQVWVPVNKGGRNVLTTNDDLFSLDSSCPRLSKYRDISVNYQFSTGEDSTELVKGLPGRVFSGQVPEWTPDVRFFRSDEYPRVDYAQRYDVRGTLALPIFEQGSSTCLGVIEVVTTTQKIKYQLELESVCKALEAVDLQSSRNWSTQNVKGCVKPYQAALPEIREVLRSACETHKLPLAQTWVSCIQQGKDGCRHSDDNYVHCVSTVDHAFHVTDPYIEGFHEACSEHHLLKGQGIVGKAFMTNQPCFSDDITSCVKTEYPLSHHARMFGLHAAVAIRLRSMKTGSTDFVLEFFLPVECRDPEEQKKMLNSLSIIIQQICRSLRVVTDKELEEESDFPVSEMIVSSDPRPSGIASFTEVQLSGNDVSIFPMENPREVLGVKSSKLRQHQPDSNLKVGVKCGRECSALGEGSFSSVGVSKTREKRRTRAEKAITLEVLRKYFSGSLKDAANSIGVCSTTLKRICRQHGIKRWPSRKIKKVGHSLQKLQLVIDSVEGASGAFQINSFYTNFPELTSPNLSGTSPFSTSKLSDQPKPTNLSPEGGVVSPQATASKSPSSSCSQSSSSSQCCSSRTQQHRPTCNVTGDDDPIVGDNSGDGVLKRVRSEAELHAFGQDRTQLLPRSQSHKILNELQKLQPIPPSLKNNGVAQEREVRRVKVAYGDEKTRFRMQNDWRYEDLVQEIAKRFSIEDMSKFYIKYLDDDSEWVLLTCDADLEECIDVCRSSQSNTIKLSLHLSRHHLERFIGTGGP

SEQ ID NO: 163 - protein, 912 aa, Prunus avium
MDDDVLSPATMMGAQPDSTTDLDFMDELFLEGCWLETTDGPEFPNQSHANSGAHLNSSVFWHTLEANGNLTMNPSENSNQEVIQTPFFKQLHEGPVNPQFPSQNMIDVDGYSGHSADPTIKSYELNRRWWIGPLGNQGPASSVMERLTRALVCIRDVMRDKNVLVQVWVPVNKGGRNVLTTNDDLFSLDSSCPRLSKYRDISVNYQFSTGEDSTELVKGLPGRVFSGQVPEWTPDVRFFRSDEYPRVDYAQRYDVRGTLALPIFEQGSSTCLGVIEVVTTTQKIKYQLELESVCKALEAVDLQSSRNWSTQNVKQGCVKPYQAALPEIREVLRSACETHKLPLAQTWVSCIQQGKDGCRHSDDNYVHCVSTVDHAFHVTDPYIEGFHEACSEHHLLKGQGIVGKAFMTNQPCFSDDITSCVKTEYPLSHHARMFGLHAAVAIRLRSMKTGSTDFVLEFFLPVECRDPEEQKKMLNSLSIIIQQICRSLRVVTDKELEEESDFPVSEMIVSSDPRPSGIASFTEVQLSGNDVSIFPMENPREVLGVKSSKLRQHQPDSNLKVGVKCGRECSALGEGSFSSVGVSKTREKRRTRAEKAITLEVLRKYFSGSLKDAANSIGVCSTTLKRICRQHGIKRWPSRKIKKVGHSLQKLQLVIDSVEGASGAFQINSFYTNFPELTSPNLSGTSPFSTSKLSDQPKPTNLSPEGGVVSPQATASKSPSSSCSQSSSSSQCCSSRTQQHRPTCNVTGDDDPIVGDNSGDGVLKRVRSEAELHAFGQDRTQLLPRSQSHKILNELQKLQPIPPSLKNNGVAQEREVRRVKVAYGDEKTRFRMQNDWRYEDLVQEIAKRFSIEDMSKFYIKYLDDDSEWVLLTCDADLEECIDVCRSSQSNTIKLSLHLSRHHLERFIGTGGP

SEQ ID NO: 164 - protein, 755 aa, Prunus persica
MLAIGYLKECTKGRDVLIQIWVPIKRGGRQYLTTHDQPFSLDPNSKSLAGYRNVSKDYQFITEEDSAESVGLPSRAFLGKLLEWTPDVRFFRSYEYPRIDYAQQYDVRDSLALPIFENGSGTCLGVVEIVMAPQKVNDRPELEYVCQALETHDELYQAALTEIVEVLASVCKTHRLPLAQTWAPCIQQGKGGCRHSDENYARCVSIVDAACFVADLDILGFHEACSEHHLFQGQGIVGTAFTINKPCFATDIKAFSKTEYPLSHHARMFGLHAAVAIPFRSVYTGPADLVLEFFLPKDCQDPEEQKQMLNSLCIVIQQACQSLHMNVDKELKEEIMFPIREPVIGSDGGLHTEETQRLISSPPEEPSGKESSWIAHMIEAQQKGKGVSVSLDYQTEEPKEEFKVTTHWGNTQGSLHSGQVFSEFGQLHQSSGSHGNVEGGADSYSFGGHRTSGGRKAGEKRRTKTEKRISLPVLRQYFAGSLKDASKSIGVCPTTLKRICRQHGITRWPSRKIKKVGHSLKKLQLVIDSVQGAEGAIHIGSFYSSFPELNFPKFPGSGQYSSMNMSDHSKQVNPQQHDQSGLYSHVTTTKSPSSSCSQTSGPNVCVAGAQQHTITINTLGSGDSLMTEDPVGVLKRACGDADLHASFQEETKLIHRSQSHKSFSDNLSYENLSPLPGSSGQSLRDGGVYRVKATFRDEKKKHLDDDCEWVLLNCDADLEECMEIYSSSPGRTVRLCLQQVFHPNLAASFGNSRPS

SEQ ID NO: 165 - protein, 645 aa, Prunus persica
MDDDVLSPATMMGAQPDSATDLDFMDELFLEGCWLETTDGPEFPNQSHANSSAHINPSVFWHMLEANGNLTMNPSENSNQEVIQTPFFKQLHEGPVNPQFPSQNMIDVDGYSGHSADPTIKSYELNRRWWIGPLGNQGPASSVMERLTRALVCIREVMRDKNVLVQVWVPVNKGGRNVLTTNDDLFSLDSSCPRLSKYRDISVNYQFSTGEDSTELVKGLPGRVFSGQVPEWTPDVRFFRSDEYPRVDYAQRYDVRGTLALPIFEQGSRTCLGVIEVVTTTQKIKYQLELESVCKALEAVDLQSSRNWSTQNVKGCVKPYQAALPEIQEVLRCACETHKLPLAQTWVSCIQQGKDGCRHSDDNYVHCVSTVDHAFHVTDPYIEGFYEACSEHHLLKGQGIVGKAFMTNQPCFSDDITSCVKTEYPLSHHARMFGLHAAVAIRLRSMKTGSTDFVLEFFLPVECRDPEEQKKMLNSLSLIIQQICRSLRVVTDKELEEESDFPVSEMIVSSDPRPSGIASFTEVHLSGNDVSIFPMENPREVLGVKSSKLRQHQPDSNLKVGVKCGRECSALGEGSFSSVGVSKTREKRRTKAEKAITLEVLRKYFSGSLKDAANSIGGYADNTGLNVGHLEKLRRLVTLYRNSNL

SEQ ID NO: 166 - protein, 865 aa, Prunus persica
MDYGALMPNSSSCGTLYDTTMEGDFMDEILFEGCWLQSNAGFNLLQQQQQPATLRQAGGCGLVPGQNPGPSSSVKERLMLAIGYLKECTKGRDVLIQIWVPIKRGGRQYLTTHDQPFSLDPNSKSLAGYRNVSKDYQFITEEDSAESVGLPSRAFLGKLLEWTPDVRFFRSYEYPRIDYAQQYDVRDSLALPIFENGSGTCLGVVEIVMAPQKVNDRPELEYVCQALEAVDLRSSQNFWPLCVKTHDELYQAALTEIVEVLASVCKTHRLPLAQTWAPCIQQGKGGCRHSDENYARCVSIVDAACFVADLDILGFHEACSEHHLFQGQGIVGTAFTINKPCFATDIKAFSKTEYPLSHHARMFGLHAAVAIPFRSVYTGPADLVLEFFLPKDCQDPEEQKQMLNSLCIVIQQACQSLHMNVDKELKEEIMFPIREPVIGSDGGLHTEETQRLISSPPEEPSGKESSWIAHMIEAQQKGKGVSVSLDYQTEEPKEEFKVTTHWGNTQGSLHSGQVFSEFGQLHQSSGSHGNVEGGADSYSFGGHRTSGGRKAGEKRRTKTEKRISLPVLRQYFAGSLKDASKSIGVCPTTLKRICRQHGITRWPSRKIKKVGHSLKKLQLVIDSVQGAEGAIHIGSFYSSFPELNFPKFPGSGQYSSMNMSDHSKQVNPQQHDQSGLYSHVTTTKSPSSSCSQTSGPNVCVAGAQQHTITINTLGSGDSLMTEDPVGVLKRACGDADLHASFQEETKLIHRSQSHKSFSDNLSYENLSPLPGSSGQSLRDGGVYRVKATFRDEKKKIARRFNLDDISRTGIKHLDDDCEWVLLNCDADLEECMEIYSSSPGRTVRLCLQQVFHPNLAASFGNSRPS

SEQ ID NO: 167 - protein, 912 aa, Prunus persica
MDDDVLSPATMMGAQPDSATDLDFMDELFLEGCWLETTDGPEFPNQSHANSSAHINPSVFWHMLEANGNLTMNPSENSNQEVIQTPFFKQLHEGPVNPQFPSQNMIDVDGYSGHSADPTIKSYELNRRWWIGPLGNQGPASSVMERLTRALVCIREVMRDKNVLVQVWVPVNKGGRNVLTTNDDLFSLDSSCPRLSKYRDISVNYQFSTGEDSTELVKGLPGRVFSGQVPEWTPDVRFFRSDEYPRVDYAQRYDVRGTLALPIFEQGSRTCLGVIEVVTTTQKIKYQLELESVCKALEAVDLQSSRNWSTQNVKGCVKPYQAALPEIQEVLRCACETHKLPLAQTWVSCIQQGKDGCRHSDDNYVHCVSTVDHAFHVTDPYIEGFYEACSEHHLLKGQGIVGKAFMTNQPCFSDDITSCVKTEYPLSHHARMFGLHAAVAIRLRSMKTGSTDFVLEFFLPVECRDPEEQKKMLNSLSLIIQQICRSLRVVTDKELEEESDFPVSEMIVSSDPRPSGIASFTEVHLSGNDVSIFPMENPREVLGVKSSKLRQHQPDSNLKVGVKCGRECSALGEGSFSSVGVSKTREKRRTKAEKAITLEVLRKYFSGSLKDAANSIGVCSTTLKRICRQHGIKRWPSRKIKKVGHSLQKLQLVIDSVEGASGAFQINSFYTNFPELTSPNLSGTSPFSTSKLSDQPMPTNLSPEGGVVSPQATTSKSPSSSCSQSSSSSQCCSSRTQQHRPTCNVTGGDDPIVGDNSGDGVLKRVRSEAELHAFGQDRTQLLPRSQSHKILNELQKLQPIPPSLKNNGVAQEGEVQRVKVAYGDEKTRFRMQSDWRYEDLVQEIAKRFSVEDMSKFYIKYLDDDSEWVLLTCDADLEECIDVCRSSQSNTIKLSLHLSRHHLERFIGTGGPS

SEQ ID NO: 168 - protein, 935 aa, Prunus persica
MDYGALMPNSSSCGTLYDTTMEGDFMDEILFEGCWLQSNAGFNLLQQQQQPVCPPISQALTDHPSHYFPPYDHQSNSTVAHLSTSPHQQIYQEENTDGSYPESHSSFVVEGNTEAGRRLWIGPRANPGPSSSVKERLMLAIGYLKECTKGRDVLIQIWVPIKRGGRQYLTTHDQPFSLDPNSKSLAGYRNVSKDYQFITEEDSAESVGLPSRAFLGKLLEWTPDVRFFRSYEYPRIDYAQQYDVRDSLALPIFENGSGTCLGVVEIVMAPQKVNDRPELEYVCQALEAVDLRSSQNFWPLCVKLYQAALTEIVEVLASVCKTHRLPLAQTWAPCIQQGKGGCRHSDENYARCVSIVDAACFVADLDILGFHEACSEHHLFQGQGIVGTAFTINKPCFATDIKAFSKTEYPLSHHARMFGLHAAVAIPFRSVYTGPADLVLEFFLPKDCQDPEEQKQMLNSLCIVIQQACQSLHMNVDKELKEEIMFPIREPVIGSDGGLHTEETQRLISSPPEEPSGKESSWIAHMIEAQQKGKGVSVSLDYQTEEPKEEFKVTTHWGNTQGSLHSGQVFSEFGQLHQSSGSHGNVEGGADSYSFGGHRTSGGRKAGEKRRTKTEKRISLPVLRQYFAGSLKDASKSIGVCPTTLKRICRQHGITRWPSRKIKKVGHSLKKLQLVIDSVQGAEGAIHIGSFYSSFPELNFPKFPGSGQYSSMNMSDHSKQVNPQQHDQSGLYSHVTTTKSPSSSCSQTSGPNVCVAGAQQHTITINTLGSGDSLMTEDPVGVLKRACGDADLHASFQEETKLIHRSQSHKSFSDNLSYENLSPLPGSSGQSLRDGGVYRVKATFRDEKKRFSMLPNCSFRDLQLEIARRFNLDDISRTGIKHLDDDCEWVLLNCDADLEECMEIYSSSPGRTVRLCLQQVFHPNLAASFGNSRPS

SEQ ID NO: 169 - protein, 913 aa, Prunus persica
MDDDVLSPATMMGAQPDSATDLDFMDELFLEGCWLETTDGPEFPNQSHANSSAHINPSVFWHMLEANGNLTMNPSENSNQEVIQTPFFKQLHEGPVNPQFPSQNMIDVDGYSGHSADPTIKSYELNRRWWIGPLGNQGPASSVMERLTRALVCIREVMRDKNVLVQVWVPVNKGGRNVLTTNDDLFSLDSSCPRLSKYRDISVNYQFSTGEDSTELVKGLPGRVFSGQVPEWTPDVRFFRSDEYPRVDYAQRYDVRGTLALPIFEQGSRTCLGVIEVVTTTQKIKYQLELESVCKALEAVDLQSSRNWSTQNVKQGCVKPYQAALPEIQEVLRCACETHKLPLAQTWVSCIQQGKDGCRHSDDNYVHCVSTVDHAFHVTDPYIEGFYEACSEHHLLKGQGIVGKAFMTNQPCFSDDITSCVKTEYPLSHHARMFGLHAAVAIRLRSMKTGSTDFVLEFFLPVECRDPEEQKKMLNSLSLIIQQICRSLRVVTDKELEEESDFPVSEMIVSSDPRPSGIASFTEVHLSGNDVSIFPMENPREVLGVKSSKLRQHQPDSNLKVGVKCGRECSALGEGSFSSVGVSKTREKRRTKAEKAITLEVLRKYFSGSLKDAANSIGVCSTTLKRICRQHGIKRWPSRKIKKVGHSLQKLQLVIDSVEGASGAFQINSFYTNFPELTSPNLSGTSPFSTSKLSDQPMPTNLSPEGGVVSPQATTSKSPSSSCSQSSSSSQCCSSRTQQHRPTCNVTGGDDPIVGDNSGDGVLKRVRSEAELHAFGQDRTQLLPRSQSHKILNELQKLQPIPPSLKNNGVAQEGEVQRVKVAYGDEKTRFRMQSDWRYEDLVQEIAKRFSVEDMSKFYIKYLDDDSEWVLLTCDADLEECIDVCRSSQSNTIKLSLHLSRHHLERFIGTGGPS

SEQ ID NO: 170 - protein, 573 aa, Prunus yedoensis
  REGION 1..573: note = var. nudiflora
MDNDVLSPATMMGAQPDSATDLDFMDELFLEGCWLETTDGSEFPNQSHANSGAHLNPSVFWHTLEANGNLTMNPSENSNQDVIQTPFFKQLHEGPVNPQFPSQNMIDVDGYSGHSADPTIKNYELNRRWWIGPLENQGPASSVMERLTRALVCIRDVMRDKNVLVQVWVPVNKGDRNVLTTSDGLYSLDSSCPRLSKYRDISANYQFSTGEDSTELVKGLPGRVFSGQVPEWTPDVRFFRSDEHPQVEYAQRYDVRGTLALPIFEQGSRTCLGVIEVVTTTQKIKYQLELESVCKALEDVDLQSSRNWRTQNVKGCVKPYQAALPEIQEVLRSACETHKLPLAQTWVSCIQQGKDGCRHSDDNYVHCVSTVDHVFHVTDPYIEGFHEACSEHHLLKGQGIVGKAFMTNQPCFTDDITSCVKTEYPLSHHARMFGLHAAVAIRLRSMKTDSTDFVLEFFLPVECRDPEEQKEMLNSLSLIIQQICRSLRVVTDKELEEESDFPFSEMIVSSDPRPSDIASFTEVQLSGNDVSIFPMENPRVGAGCEILKVKATSTRFPKGWCRVWERVFYFGRG

SEQ ID NO: 171 - protein, 837 aa, Prunus yedoensis
  REGION 1..837: note = var. nudiflora
MDDDVLSPATMMGTQPDSATDLDFMDELFLEGCWLETTDGPEFPNQSHANSGAHLNPSVFWHTLEANGNLTMNPSENSNQEVIQTPFFKQLHKGPVNPQFPSQNMIDVDGYSGHSADPTIKSYELNRRWWIGPLENQGPASSVMERLTRALVCIRDVMRDKNVLVQVWVPVNKGGRNVLTTNDDLFSLILAVPGFPNIEKSLLIMNSQLERILQSWLRGCPAGFSQVRFLSGLLMFDSSEVMSTHGLTMLNVMMTCLGVIEVVTTTQKTKYQHELESVCKALEDVDLQSSRNWRTQNVKGCVKPYQAALPEIQEVLRSACETHKLPLAQTWVSCVQQGKDGCRHSDDNYVHCVSTLDHAFHVTDPYIEGFHEACSEHHLLKGQGIVGKAFMTNQPCFSDDITSCVKTEYPLSHHARMFGLHAAVAIRLRSMKTGSTDYVLEFFLPVECRDPEEQKKMLNSLSLIIQQICRSLRVVTDKELEEESDFPISEKIVSSDPRPSGIASFTEVQLSGNDVSIFPMENPREVLGVKSSNLKDAANSIGVCSTTLKRICRQHGIKRWPSRKIKKVGHSLQKLQLVIDSVEGASGAFQINSFYTNFPELTSPNLSRTSPFSTSKLSDQPKPTNLSPEGGVVSPQATASKSPSSSCGQSSSSSQCCSSRTQQHPPTCNVTGDDDPIVGDNSGDGVLKRVRSEAELHAFGQDRTQLLPRSQSHKILNELQKLQPIPPSLKNNGVAQEREVQRVKVAYGDEKTRFRMRSDWRYEDLVQEIAKRFSIEDISNFDIKYLDDDSEWVLLTCDADLEECIDVCRSSQSHTIKLSLHLSRHHLRRFIRIDGPS

SEQ ID NO: 172 - protein, 705 aa, Prunus yedoensis
  REGION 1..705: note = var. nudiflora
MRFYLKDAGCRAMLDSTFCSSSRPVCPPISRALTDHPSHYFPPYDHQSNSTVAHLSMSSHQQIYQEENTDGSYPESHSSFVVEGNTEADRRLWIGPRLPEWTPDVRFFRSYEYPRIDYAQQYDVRGSLALPIFENGSGTCLGVVEIVTTPQMVNYCPELEYVCQALEAVDLRSSQNFCPHCVKTCDELYQAALTEIVEVLASVCKTHRLPLAQTWAPCIQQGKGGCRHSDENYAHCVSTVDAACFVADLDILGLHEACSKHHLCRGQGIVGAAFTTNKPCFATDIKAFSKTEYPLSHHARMFGLHAAVAIPFRSVCTGPADFVLEFFLPKDCQDPEEQKQMLNSLCIVIQQACWSLHVDVDKELEEEIMFPIREPVIGSDGGLHKEETQRLISSPTEEPSGKESSWIAHMIEAQQKGKGVSVSLDYQTEEPKEEFKLHQSSGSHGNVEGGADSYSFGGRRTSGGRKAGEKRRTKTEKTISLPVLRQYFAGSLKDAAKSIGVCPTTLKRICRQHGITRWPSRKIKMVGHSLKKLQLVIDSVQGAEGAIHIGSFYSSFPELNSPKFPGSGQYSSMNMSDHSKQVNPLQHDQSGLYSHGTTTKSPSSSCSQTSGPSVCVAGAQQHTVTINNLSSGDALMTEDPVGVLKRACSDADLHASFQEETKLIHRSESHKSFSDNLSYENLPPLPGSSGRSLQDGLQSKSYFQG

SEQ ID NO: 173 - protein, 907 aa, Pyrus x bretschneideri
MDDGVLSPATMLGAQPDSAMDLDFMDELFLEGCWLEARDGPEFPNQSLPNTPLNPSFIWHTLETNGNMSMNPYQNSNQEEMQTPFFKQLEEGPANPQSPCQNMIEDVVAYSGQSEDPTIGRELSTRWWIGPTGNDGSASSVTQRLMTALTYIREVMRNKDVLVQVWVPVNRGGRDVLTTNELFCLDPSCSRLAKYRDISVNYQFSTGEDSTEMVKGLPGRVFSGKVPEWTPDARYFTSDEYPRVRHAQQYDVSGTLALPIFEQGSRTCLGVIEVVTTDRKISYQPDIDGICKALEAVDLRSSRNLSTENVKGCDKPYHAALPEIQEILRSACETHKLPLAQTWVSCIEQGKDGCRHSDDNYIHCVSTVDHACHVADPYIQGFHEACSEHHLLRGQGIVGRAFMTNQPCFSDDMTSFFKTEYPLSHHARMFNLHAAVAIRLRSTDIGSTDFVLEFFLPLECRDPKEQKKMLNSLSLIIQQTCRSLRVVTDKEVEEETKFHVSEVIVPSDPGPSNVACFTEVQQNGNAVSMFPNKKQRKVLSVKLSKLRQHQEDSNLKSAECGEEFSVLGEGEVSFSTVGASKTREKRRAKAEKDINLQVLRKYFSGSLKDAAKSIGVCSTTLKRICRQHGIKRWPSRKIKKVGHSLRKLQLVIDSVEGASGAFQINSFYTNFPELTSPNLSGTSPFSNSKLSDQPNQTNLSPEGGVFSPQATASKSPPSSCSQNSSSSQCCSSKTQQHPFSCNVAGNDDPVGDNSRDGVLKRVRSEAGLHDFGQDRTELLPRSQSQKILCEQQNLQSIPPSLKNNGRVTQVEVQRVKVAYGDEKTRFRMQSNWRYEDLVQQIAKRFSIQDMSNFDIKYLDDDSEWVLLTCDDDLEECVDVCRSSQSHTIKLSLQISRHHLKGLIGRPS

SEQ ID NO: 174 - protein, 907 aa, Pyrus x bretschneideri
MDDGVLSPATMLGAQPDSAMDLDFMDELFLEGCWLEARDGPEFPNQSLPNTPLNPSFIWHTLETNGNMSTNPSQNSNQEEMQTPFFKQLEEGPANPQSPCQNMIEDVVACSGQSEDPTIGRELSTRWWIRPTGNDGSASSVTQRLMTALTYIREVMRNKDVLVQVWVPVNRGGRDVLTTNELFCLDPSCSRLAKYRDISVNYQFSTGEDSTEMVKGLPGRVFSGKVPEWTPDARYFTSDEYPRVGHAQQYDVSGTLALPIFEQGSRTCLGVIEVVTTDQKIRYQPDIDGICKALEAVDLRSSRNLSTENVKGCDKPYHAALPEIQEILRSACETHKLPLAQTWVSCIEQGKDGCRHSDDNYIHCVSTVDHACHVADPYIQGFHEACSEHHLLRGQGIVGRAFMTNQPCFSDDMTSFFKTEYPLSHHARMFNLHAAVAIRLRSTDIGSTDFVLEFFLPLECRDPKEQKKMLNSLSLIIQQTCRSLRVVTDKEVEEETKFHVSEVIVPSDPGPSNVACFTEVQQNGNAVSMFPNKKQRKVLSVKLSKLRQHQEDSNLKSAECGEEFSVLGEGEVSFSTVGASKTREKRRAKAEKDINLQVLRKYFSGSLKDAAKSIGVCSTTLKRICRQHGIKRWPSRKIKKVGHSLRKLQLVIDSVEGASGAFQINSFYTNFPELTSPNLSGTSPFSNSKLSDQPNQTNLSPEGGVFSPQATASKSPPSSCSQNSSSSQCCSSKTQQHPFSCNVAGNDDPVGDNSRDGVLKRVRSEAGLHDFGQDRTELLPRSQSQKILCEQQNLQSIPPSLKNNGRITQVEVQRVKVAYGDEKTRFRMQSNWRYEDLVQQIAKRFSIQDMSNFDIKYLDDDSEWVLLTCDDDLEECVDVCRSSQSHTIKLSLQISRHHLKGLIGRPS

SEQ ID NO: 175 - protein, 1483 aa, Quercus suber
MDPPIKQAKGFIVLHESSSSSSSSSSSSRVLDRKSVIFSAVQHKYIQTYITTSSLKTSYTVYKTLTSVQSPCEMEIERKLNMEYSDFTPNNSTAYGNFSDNNTMASDFMGELLSEGCWLETSTGGFNLLPPAPLPTTTTSRALNDPSHYYLPSLDSNPHQQIYQEDQTEGAFPESESILVDGNELGRRWRIGPRANPGPCSSVKERLVLAVGYLKECTKIMNVLIQIWVPIRKGGRYFLSTYDQPYSFDPNSKSLADYRNVSRAYQFTVEEDREESVGIPCRVFLGRLPEWTPDVRFFKRDEYPRISYAQQYDIRGSLALPVFERGSGTCLGVVEIVTTTQKINYRPELEHVCQALEAVDLRSSQYFSPPTVKACDELYHAALNEIVEVLTSVSKTHRLPLALTWAPCVQQGKGGCRHSDENFAHCVSTVDTACYVADLEVLGFLEACSDYHLFRGQGTVGTAFTTTKPCFATDITAFSKTEYPLSHHARMFGLHAAVAIPLRSIYTGSADFVLEFFLPKDCQDPEEQKQMLNSLSIVLQQARRSLHAVVEKELEEEEILYPVKEVVVASDGKPTSSTTTNLKEAYSKESSWVAHMMEAQQKGKGLSIPLEYQEEEPNEEFKMTTHWDSTQVGLRSGQAFSDSGAQLQQSSESKGSAEGGGDSYSYGGRQSSGGRKAGEKRRTKTEKTISLPVLRQYFAGSLKDAAKSIGVCPTTLKRICRQHGITRWPSRKIKKVGHSLRKLQLVIDSVQGAEGSIQIESFYNSFPELSSQQANSPISSLNMSDSKDPHSKQESGLFSFGSGPLRSPASSCSQTSSPSIYCTTGVEQHSTSINALSSADTLITENLGGILHGACSDAELHALNLQQEPNLIHRVENLKSFGEHPGLETLSCLPGSSSQNSRDGGAFRVKATFGDEKTRFSLHPNWSFGALQLEIARRFNLDDVSRVDIKYLDDDREWVILTCDADLQECMDLFRASQSHTIRLSLQHAYKIHTAPRPSLTNVPALNYLLRSEIYVSEDGQLRSVPLILGYTPKKADVQPAGNAITEGDYRLRRIDVARKNFIAPYDLAPVPHPNPQGEDEGGVQIIPSDSEEELDRQSCVRPPLLLTTVPEDSSEEEMSDLRLLLKRRSNKVEVKGTGTSRPEANLPPPPPAPQVPDPALKPIPDLKKKRPMEPEDKEKGLPPKNKQQKVVKEPRQKRASSVESREEPPLAEVRRGQRIWSPRLELDGVPFPWETSVRNYDGGRAGLIAEALQQPLLLPRDMDSYRRFSQYELFKSLKRDLAMITQQVFVAEEWNRKTHVEAQAEAQARSEAERALDSLKGEISKLSEQLKGVAQERDSLDAGLKNAESQAESQRRQLSETQKNLAAERETTKALHAELLKAKKAAEEAQRDVQLAKEATEAEKRASFQLGVETTEKGLTEQFAAVARDYCDLTWGKALDAAGVPLDSNLNCQKISFMAKIFGSIQMMMSPLHNSQRHLSCP

SEQ ID NO: 176 - skipped

SEQ ID NO: 177 - protein, 863 aa, Quercus suber
MENGFSAPGTILGALPNSAMELALFDELFQDRCWLEAAEGLEFLLQSPSSSGSVLGPSFVWPALEARDNLSLNSSQTGNLDEAQRPLPDESQERSLVNAVSLGQNTVDVVAGCSNESENIVIKGPKLGRRSQIAPNMNQGLTYCLEERLMKAIEYIREFTRGKDVLIQVWLPVNRDGRRVLTTSNQPFAFGSSNPSLASYRDISADFHFAAEEDSKEVLGLPGRVFLGKVPEWTPDVQFFTKNEYFRVVHAQLYDVRGTLALPIFEHGSSNCVGVIEVVMTAQQTQYGPEIESVCKALEAVDLRSFDALSTENLKACPKSYQAALPEIQEVLRFACKTHRLPLAQTWVPCIQQGKVGCRHSNENYIYCVSTVDRACIVADPNMQEFHEACSEHHLLKGEGIVGEAFKTNQPHFSSDITSLSKAEYPLSHHARLFGLHAAVAIHLRSIHTGTDDFVLEFFLPTDCRDPEEQKNMLNSLSCIIQQVCRSLRVVTDKELEEDTNLPVNGTGKLSREEILKEKSFEFCQPYQDSNLKVNVDCGEECSMHGEGNFPSVGKAKTGEKRRTKAEKTIPLEVLQQYFAGSLKDASKSIGVCPTTLKRICRQHGINRWPSRKIKKVGHSLKKLQLVINSVEGASGALQIDSFYTKFPKLASPNLSRTNPFSASKLSDHPQPILQPEGGIFSPQTAASKSPYSSCSQSSSSSHAPTRNVVGCKDPIVGENFSDSALQRITSEAELHASSQAPKLQPKLECLKSFNEHPSAENFPPLQKLKVTYGDEKIRLRMKNNWRYKNLLLEIASRFNIDDISRFDVKYLDDDSEWVLLTCDDDLEECIDICRSSQSNTIKLALQVSRHHVGRSLGSNDTS

SEQ ID NO: 178 - protein, 672 aa, Sesbania rostrata
SPNPNVSVRFFRSHEYPRVVQPHQYGSLALPVFERGTATCLGVLEIVMTNQTIIHYRPQLDNVCNALEAVDFRTSQNYIPPAVKVFDELYQAALNEIVEVLTSVCKTHNLPLALTWAPCIQQGKCGCGVSSDQNYVCCVSTVDSACFVADLDILGFQEACSEYHLFRGQGIVGTAFTTTKPCFAMDITAFSKAEYPLAHHAKMFGLHAAVAIPLRSVYTGSADFVLEFFLPKDCHDSEEQKQMLHSLSMVVQQACRSLHVVMEDDFTLPHSKEEIAPHHHDQKLFASPSQSQVETCSKESSSSWIAHMMEAQQKGKGVSVSLEYLEEPKEEFKVTTNWDTSTDQDQRAQTQVFSDFGQLEQSSGSRFKASVEGGEESYTFGGRRSSSSGRKPGEKRRTKAEKTISLPVLRQYFAGSLKDAAKSIGVCPTTLKRICRQHGITRWPSRKIKKVGHSLKKLQLVIDSVQGAEGAIQIGSFYASFPELSSADFSASRRSESSKKMMNGYPENSLYGHGDGITSLKSPPSACSQNFGPTTNQSSTIITNNGDVLMTESPAPPPPPPHTDAALLRRVHSEAELLHGSIQFEDTKHFTTRAKSQQTVLPPLSESSGWNSLERGAFRVKATFADEKIRFSLQPMWGFRDLQLEIARRFNLNDVSNMVLKYLDDDGEWVVL

SEQ ID NO: 179 - protein, 841 aa, Solanum lycopersicum
MEDAAFTLLAKLHDDNNATDFTEFGFWLEATDQPSNSNSNYCTSNQMDSAPPTQSRRKLWIGPNNPNPTSSIPPVNTRLVQAIEYLKNSTTHNKEVLIQIWVPVNRGGKHVLITNNQPYFLNPNSHSLLQYRNVSQNYQFAADKDSNELVGLPGRVFLKKLPEWTPDVRFFKSEEYPRVNYAHQHNVRGSIAVPVFETGSGTCLGVVEIVTTIQKTHYHLELEHVCKALEAVNLRSSGISSNPSKIKDQDCNESYLAALAEIQYILTCVCDTHKLPLAQTWAPCIQQGKGGCLQSDENFASCVSTVDSSCYVRDQHVVPFHLACSEHHLLKGEGVAGGAFNTNQPCFATDITAFSKAEYPLSHHARMFGLCSAVAIRLRSIYTGSADFVLEFFLPLDCKNTEEQKIMLSSLSSVIQQSCRSLRVVTDQELQEEKEVVRLPIGEEESRKPVSSSYRDQDASSWLSEMLDAQRKGKGAAAVSENFKVTATPWDYTQRESIHASTFSEPNQTFEPKGGSFDFSSGTGSHSSGAKRAGERRRSKTEKSISLQVLRQYFAGSLKDAAKSIGVCPTTLKRICRQHGITRWPSRKIKKVGHSLQKLQLVIDSVHGAEGAIKLSSFYTNFPELNSPNNPGTSNFSASKNDDHLQQVNTQPDGSPVTTTSKSTSSSGSHNSSSSLFCSTGSKNCTTEENPGGMPKRAHTETGLHDMGQEETKLLVRSQSQKIQSNHNSVEPVCPLSTSSNQVLGRFKVKAIFGKEKIRFSLQSHWGFRDVKHEVMRRFNVEDVGKIDLKYLDDDDEWVLLTCDADLEECIDIHKFSKRRTIKVSLHHTNLGSSFGSSGPA

SEQ ID NO: 180 - protein, 912 aa, Solanum lycopersicum
MDERVIPSNPLLTTPSDYLMDLDYMDGLFLEGCWLETTDGNEFLQHSPGIFNAPFDSSFMWPTTIDANNVEFNGISSKDAQQEKQRPSLTENLSINHCQELNYAKVQSFGENMNNAMCTSSLSENHLVEAHELNKRWWIGPKASSSVMDRLIWALGYIRDCSRDKDILLQLWVPINRDGRRVLSTTNQPFLLDLNCPQLANYREVSVNYQFPANEDSKEIVGLPGRVFADKVPEWTPDVRFFRSEEYPRVEHAQQYDVRGTLAVPVFEQGSRNCLGVIEVVMTTQKIKYRSELESVCKALEAVDLSTSEVSTTQDAKVCDLSYQAALPEVLEVLKSACETHGLPLAQTWVPCIQQGKGGCRHSQENLIHCVSTEDSACYVADPRVQGFHDACSEHHLLKGQGVVGRAFNTNQPCFSADLTSYSKSEYPLSHYAKMFGLQAAVAIRLRSISTGSSDFVLEFFLPSDCRNPEDHRKMLTSLSIIIQNVCRTLRVVTDKELQEETISVGEMANHTVEQHKEHTETSQERTSWTSCDAEFQESSVMSTFQDEKPDEMLRKDSVEFRHRKNSAYEEGVSRNLGKTGDRRRAKAEKTITLQVLQQYFAGSLKDAAKSIGVCPTTLKRICRQHGIKRWPSRKIKKVGHSLQKIQRVIDSVQGASGTLQIESFYSNFPELASPNASRMSPFADSKSNEHPTALNTQQERCITSPNPDASKSPSSSSSRSSSSSQCCSSGTKPQSPQSHPLSIVGDEDLIVQEESVDNAVKRVKSEPELHLSSEALKTIPRSQSHLCVAENPISENLVLKRSPSTSQEEAPRVKVTHGEEKIRFRMQNSWRYNDLLREITRRFGIDDPSGLQLKYLDDDSEWVLLTCDADLEECIDVCMSSQIQMIKLILVQDSQHHFGSSFGSSSPILVQ

SEQ ID NO: 181 - protein, 913 aa, Solanum tuberosum
MDERVIPSNPLLTTPSDYLMDLDYMDGLFLEGCWLESTDGNEFLQHSPGIFNAPFDSSFMWPTTIDANNVEFNGISSKDAQQEKQRPSLTENLSINHCQEINYAKVQSFGENMNNAMCTSSLSENHLVEAPELNKRWWIGPKASSSVMDRLIWALGYIRDCSRDKDILLQLWVPINRDGRRVLSTTNQPFLLDLNCPQLANYREVSVKYQFPANEDSKDIVGLPGRVFADKVPEWTPDVRFFRSEEYPRVEHAQQYDVRGTLAVPVFEQGSRNCLGVIEVVMTTQKIKYRSELESVCKALEAVDLSTSEVSTTQDAKVCDLSYQAALPEVLEVLKSACETHGLPLAQTWVPCIQQGKGGCRHSEENLIHCVSTEDSACYVADPRVQGFHDACSEHHLLKGKGVVGRAFNTNQPCFSADLTSYSKSEYPLSHYAKMFGLQAAVAIRLRSISTGSSDFVLEFFLPSDCRNPEDHRKMLTSLSIIIQNVCRTLRVVTDKELQEETVSMGEVANHTVEPHKEHTETSQERTSWTSCDAEFQESSVMSTFQDEKPDEMLRKDSVEFRHRKNSAYEEGVSRNLGKTGDRRRAKAEKTITLQVLQQYFAGSLKDAAKSIGVCPTTLKRICRQHGIKRWPSRKIKKVGHSLQKIQRVIDSVQGASGTLQIESFYSNFPELASPNATRMSPFADSKSNEHPTALNTQQEGCITSPNPDASKSPSSSSSRSSSSSQCCSSGTKPKSPQSQPSNIVGDEDLIVQEKSVDNAVKRIKSEPELHLSSEALKTIPRSQSHACVAENPKSENPLVKRSPSTSQEEAPRVKVTHGEEKIRFRMQNSWRYNDLLREITRRFGIDDPSGLQLKYLDDDSEWVLLTCDADLEECIDVCMSSSQIQMIKLILVQDSQHHYGSSFGSSSPILVQ

SEQ ID NO: 182 - protein, 882 aa, Solanum tuberosum
MEDAAFTLHDNNNTTSDFTEFLSDGFWLETTTTTTTATDQAGSNYFSPHPLLLDTTTNQMDPPTTQLPPPRRLWIGPNTLTNPNPTIPVNTRLVQAIEYLKNYTTHKDVLIQIWVPVNRGGKHVLITNNQPYFLNPNSHSLLEYRNVSQTYQFAAEKDSKELVGLPGRVFLKKQPEWTPDVRFFKREEYPRVRYAHQHNVSGSIAIPVFESGSGTCLGVVEIVTTIQKTPELEDVCKALEAVNLRSSRISSNPSKIKDCNESYLSVLAEIQYILTCVCDTHKLPLAQTWAPCIQQGKGGCLQSDENFASCVSTVDSACYVRDQHVVPFHLACSEHHLLKGEGVAGGAFNTNQPCFAMDITAFSKAEYPLSHHARIVGLCSAVAIRLRSILTGSADFVLEFFLPLDCKNTEDQKIMLSSLSSVIQQSCRSLRVVTDQELQEEKELVQREKVSLSIGGYHEEESRKPVSSSYRDQDASSWLAEMLDAQRKGKGAAAVSENHNDEQEENFKVTATPWDYTLRESIHASTFSEPNQNFEPKGGSGGSFDFSSGTGSHSSGAKRAGERRRSKTEKSISLQVLRQYFAGSLKDAAKSIGVCPTTLKRICRQHGITRWPSRKIKKVGHSLQKLQLVIDSVHGAEGAIKLSSFYTNFPELSSPNNPGTSNFSASKNNDHLQQVNTQPDGSPVTTTSKSTSSSGSHNSSSSLFCSTGSKNLFPCTNVFSTTEENPGGMLKRAHTETELHDMGQEETKLLVRFTSQKIQSNHNSVEPLCPLPTSSNQVLRDSGTFKVKAIFGKEKIRFSLQSHWGFGDVKHEVMRRFNVEDVGKIDLKYLDDDDEWVLLTCDADLEECIDIHKFSKRRTIKVSLHHTYRTNLGSSFGSSGPA

SEQ ID NO: 183 - protein, 727 aa, Sorghum bicolor
MEKAPQTDDDGLLACGVMEMDDIAVGDLDLMEELFMAAPGFDFSDFSQPGPGGASPGSCFSPLFDICSTTTTATPPPAPEPAGDDDQAAAAPPPRRGWVFQPRHEVEATVKERLRRALERIASLSQTQPGELLAQVWVPTVIGDRQVLTTCGQPFWLDRRNERLANYRTVSMKYQFSADETARADLGMPGRVFVGRVPEWTPDVRYFSTEEYPRVRHAQYFDIRGSVALPIFEPRSRACLGVVELVMTTEKVNYNAEIQNICSALKEVDLRSSDVSSDPRAKVTDTSYRATIPEIVDVLRTVCETHKLPLAQTWIPCICQAKRGSRHTDEKLKYCVSTVDEACYVRDLNVKGFHEACSEHHLFRGEGVVGRAFGTNEPCFSEDITTSSKVQYPLSHHAKLFSLRAAVAIRLRSITTGSLDYVLEFFLPVDCIEIEQQRAMLNSLSITIQQTCYTLRVVSLKELVDEGSIETSALTPPEYAKTMHENLDEVCSGIDAPARTASLETSEEVSSWIASLVCAQNKGVKEMDGDLPFGFSKQEDEGFSVTAGWHTTPVIGPEGSIFSGIKQHEDYKVKEVTCLRDPSSSKLGKTVEKRRTKMEKTVSLEELRKHFAGSLKEAAKNLGVCPTTLKRICRQHGINRWPSRKIKKVGHSLKKLQMVIDSVHGNEGTVQLSSLYENFTKTTWSERELQGDASYPLSEEKAKAQIPAMVVPVVRNHNNMAVLLNLQ

SEQ ID NO: 184 - protein, 645 aa, Sorghum bicolor
MGLPVFEKGSYNCLGVIELIMTRQKLNFTSELNTICSALQAVNLRSTEVSSIPRIKFSTASYKDALPEILEVLRAACLTHKLPLAQTWVTCAQQGKRGSRHSDENYRYCISTIDEACFVNEAEMRGFHEACSEHHLLRGEGVAGKAFTTNQPCFLPDIGSSTKLEYPLSHHAKIFKLKGAVAIRLRCTRTGTADFVLEFFLPTDCEALEEQKTVLDSLSSTMRGVCQTLRVVTDREMEDEAVLEMNELNSFTPQGKDKVEELSFGGKSADRRGEASWTSLAGTSQQESELAALRMHGMFSPGGQGPSLSGVQATAEGSKAKRRTKAEKTVSLQVLRQYFAGSLKDAARSLGVCPTTLKRICRQHGITRWPSRKIKKVDHSLRKLQQIIDSVHGAETAFQLNTLYKDLTNTSISSDNNLSGSVMVPPTNQSNLTDFNKHQPHKSSSNVPSTSHSHSSCSHSSKSSPSCSGGATKHAQQGIIDLIKSKNPVKDSSIQTLQTENPSLYEHFSVHEAPIDLLQDVTEKANGGHHSSPSPSSHNPKQNTDANMRVKATFGSEKVRFRLNPECNFQELKHEIAKRLSIVDTNPLVLKYLDDDSEWVLMTCDADLQECLHVYKLADIQTIKISVHLAISPATRVTTGHTGLS

SEQ ID NO: 185 - skipped

SEQ ID NO: 186 - protein, 924 aa, Trema levigata
MEDGVLSPATILGAPADYPMDLDFVDELFLEGCWLETRDGSEFLNQNSPSSNPLFDPLFWPTLEPNGESNAPKSIQEERHGSLFIESQGKSPLHTLPPPRATTDVVKYSGVSEAYITEGSSELSGRWWIEPKANPGPSSSVMERLWRALMYIKDVIRDKDILVQIWVPVHKEGRRVLTTRDLPFALDDNSSKLARYRDISVKYQFSAEEDSKELVLGLPGRVFSGKVPEWTPDVRFFRNDEYPRLIHAQQNDVRGTLALPIFELDSRTCLGVVEIVMTTQKIKYRRELESVCKALEAVDLKSSEVLSTQNVFNKYYQVAIPEIQQVLRSACDTHRLPLAQTWVPCIYQGKEGCRHSDENYGQCVSTVDHACYALDPQVQSFHEACSEHHLFRGQGVVGLAFMTNQPCFSADITSYTKTEYPLSHHARMFRLQAAVAIRLRSIHTGAADFVLEFFLPVDCKDPEEQKKMLTSLSLIIQQCCQSLRVITDKELEEESGSRVDEVVVPSNPRPAWDTCFTEAPQNDTDLSLFPEEKKPREISDGRLSKLSDNQRDSSLKPSVECVEECSTVGEGSFSSVGVGKTGERRRTKAEKTITLQVLRQYFAGSLKDAAKSIGVCSTTLKRICRQHGIKRWPSRKIKKVGHSLQKLQLVIDSVQGASGAFQIDSFYTNFPELASPNVSGTSPFSTSKPNDHPMPSNMQPGDGGTFSVQAATAAATSKSSSSCSQSSSSSHCCSSKSQLHPQTWNNVTSSDDLIAGENSGGGDDVVLKRVRSEAGLNACSEDDRKLLPRSQSHKSLMEHHRTEKWFPTSSAKNNNNGARIPQQQGEFQRVKVTYGEDNSRFRMQNNWGFIDLQQEVGRRFGIQDMVKFTLKYLDDDSEWVLLTCDADLEECFEVYRSSQNAPIKLSLQPSRHLYRGCLRGNDPL

SEQ ID NO: 187 - skipped

SEQ ID NO: 188 - protein, 927 aa, Trema orientalis
MEDGVLSPATILGAPADYPMDLDFMDELFLEGCWLETRDGSEFLNQNPPSSSPLFDPLFWPTLEPNGESNANPSPKSNQEERHRSLFIESQGKSPLHTLPPPWATTDVVKYSGVSEAHITEGSSELSRRWWIGPKANPGPSSSVMERLWRALMYIKDVIRDKDILVQIWVPVHEEGRRVLTTRDLPFALDDNSSKLARYRDISVKYQFSAEEDSKELVLGLPGRVFSGKVPEWTPDVRFFRNDEYPRLIHAQQNDVRGTLALPIFELDSRTCLGVVEIVMTTQKIKYRPELESVCKALEAVDLKSSEVLSTQNVFNKYYQAAIPEIQQVLRSACDTHRLPLAQTWVPCIYQGKEGCRHSDENYGQCVSTVDHACYALDPQVQSFHEACSEHHLFRGQGVVGLAFMTNQPCFSADITSYTKTEYPLSHHARMFRLQAAVAIRLRSIHTGAADFVLEFFLPVDCKDPEEQKKMLTSLSLIIQQCCQSLRVITDKELEEESGSRVDEVVVPSNPRPARNTCFTEAPQNDTDLSLFPEEKKPREISDGRLSKLSDNQRDSILKPSVDCVEECSTVGEGSFSSVGVGKTGERRRTKAEKTITLQVLRQYFAGSLKDAAKSIGVCSTTLKRICRQHGIKRWPSRKIKKVGHSLQKLQLVIDSVQGASGAFQIDSFYTNFPELASPNVSGTSPFSTSKPNDHPMPSNMQPGDGGIFSVQAATAAATSKSSSSCSQSSSSSHCCSSRSQLHPQTWNNVTSSDDLIAGESSGGGDDVVLKRVRSEAGLNACSEDGRKLLPRSQSHKSLMEHHKTEKWFPPSSAKNNNNGARIPQQQGEFQKVKVTYGEDRTRFRMQNNWGFIDLQQEVGRRFGIQDMVKFTLKYLDDDSEWVLLTCDADLEECFEVYRSSQNATIKLSLQPSRHLYRGCLRGNDPL

SEQ ID NO: 189 - protein, 569 aa, Trema orientalis
MEYGCQSPPNSLMEARFGSPQNSGISVTFVDLDKSDVDVDDDFFQYINASSFSFKPVTNPGSSFCLGAAASKMTSSGLSQQSFPTMEEFNQYESTPRTLEPIGVQNQNKNKLQLQADKEGDRDCSAGGGGSITSEDGFYWRKYGQKQVVGSKYPRIYYKCMHLNCKVKKKVKRSDEGHITEILHSGVHNHHHKPPNPRSAIGSSDSYSPATEKRCPPKNTLDLPQTNFEASSIENSQLDLTRSQNAEVQVSLNRSISSDLLNSVVPIQPSYSNIFCDNQAAWPKIKELLKLACQRYRLPLAQTWVPCGHRLFDQDSNSNNNLCAYSISDQAFYAGTILMQVFHDVCSKHYLLKGQGIVGEAFVTNKPRFSADVTSCCRAEYPLSYHTKRLKFRSAVAIPAYWDGSIPPGDRTAPDFVVEFFLPLDCTDVEEQKNMVTSLESFIALDLCIAAELEPEQESGSKQGGDNGLIPRSVTNLTEGKFSSVAESDTSEEPRHTRCSMKTTDLLAGGLKDAEKKSTTRDSEIAIDSIALAWILDLDMALYFVWLSALWLLISYGCYLPRISLFCGN

SEQ ID NO: 190 - skipped

SEQ ID NO: 191 - protein, 927 aa, Trema tomentosa
MEDGVLSPATILGAPADYPMDLDFMDELFLEGCWLETRDGSEFLNQNPPSSSPLFDPLFWPTLEPNGESNANPSPKSNQEERHRSLFIESQGKSPLHTLPPPWATTDVVKYSGVSEAHITEGSSELSRRWWIGPKANPGPSSSVMERLWRALMYIKDVIRDKDILVQIWVPVHEEGRRVLTTRDLPFALDDNSSKLARYRDISVKYQFSAEEDSKELVLGLPGRVFSGKVPEWTPDVRFFRNDEYPRLIHAQQNDVRGTLALPIFEQDSRTCLGVVEIVMTTQKIKYRPELESVCKALEAVDLKSSEVLRTQNVFNKYYLAAIPEIQLVLRSACDTHRLPLAQTWVPCIYQGKEGCRHSNENYGQCVSTVDHACYALDPQVQSFHEACSEHHLFRGQGVVGLAFMTNQPCFSADITSYTKTEYPLSHHARMFRLQAAVAIRLRSIHTGAADFVLEFFLPVDCKDPEEQKKMLTSLSLIIQQCCQSLRVITDKELEEESGSRVDEVVVPSNPRPARNNCFTEAPQNDADLSLFPEEKKPREISEGRLSKLTDNQRDSRLKPSVECVKECSTVGEGSFSSVGVGKTGERRRTKAEKTITLQVLRQYFAGSLKDAAKSIGVCSTTLKRICRQHGIKRWPSRKIKKVGHSLQKLQLVIDSVQGASGAFQIDSFYTNFPELASPNVSGTSPFSTSKPNDHPMPSNMQPGDGGIFSVQAATAAATSKSSSSCSQSSSSSHCCSSRSQLHPQTWNNVTSSDDLIAGESSGGGDDVVLKRVRSEAGLNACSEDDRKLLPRSQSHKSLMEHHKTEKWFPPSSAKNNNNGARIPQQQGEFQKVKVTYGEDKTRFRMQNNWGFVDLQQEVGRRFGIQDMVKFTLKYLDDDSEWVLLTCDADLEECLEVYRSSQNATIKLSLQPSRHLHRGCLRGNDPL

SEQ ID NO: 192 - protein, 581 aa, Trifolium pratense
VVDLRSSGHSSLQNVKACDKSYETALPEIQEVLRSACEMHKLPLAQTWISCIQQGKDGCRHSDDNYANCISPVEYACYVGDSSVRFFHEACMEHHLLKGQGVAGGAFMTNQPCFSADITSLSKTDYPLSHHARLFGLRAAVAIRLRSIYSTSDDYVLEFFLPVDCNDSEEQKNMLTSLSMIIQRVCRSLRVITDKELDKDNLPSNEVMAVTDGRFATNAIWSESQHRRMAASLGGEEKLSETMSRKFSEQRRQQETLTLKGDLDCGRASSPSVEGTFLSSLGINRTGEKRRAKAEKTITLQVLRQYFAGSLKDAAKNIGVCTTTLKRICRQHGIKRWPSRKIKKVGHSLQKLQLVIDSVQGASGSFQIDSFYSKFSDLSSPRTSLISTLNQIDNQVSLSTLPDPDSLSPEGASKSPSSSCSQSSFSSHSCSSMSEQQHRKGNVAIGNKDPSVGEDSVDVVLKRIRSEAELKSLIQDNKTKLMPRSQSQETLGENPKTEHHKSFLKSAPKASQKEDSHRVKVTFGDEKTRFRLPKNWGYEDLVQEIARRFNIWRSALMFVNLLRLVPSNFVCNPPVILSGVL

SEQ ID NO: 193 - protein, 587 aa, Trifolium pratense
MLMETNVVDLRSSGHSSLQNVKACDKSYETALPEIQEVLRSACEMHKLPLAQTWISCIQQGKDGCRHSDDNYANCISPVEYACYVGDSSVRFFHEACMEHHLLKGQGVAGGAFMTNQPCFSADITSLSKTDYPLSHHARLFGLRAAVAIRLRSIYSTSDDYVLEFFLPVDCNDSEEQKNMLTSLSMIIQRVCRSLRVITDKELDKDNLPSNEVMAVTDGRFATNAIWSESQHRRMAASLGGEEKLSETMSRKFSEQRRQQETLTLKGDLDCGRASSPSVEGTFLSSLGINRTGEKRRAKAEKTITLQVLRQYFAGSLKDAAKNIGVCTTTLKRICRQHGIKRWPSRKIKKVGHSLQKLQLVIDSVQGASGSFQIDSFYSKFSDLSSPRTSLISTLNQIDNQVSLSTLPDPDSLSPEGASKSPSSSCSQSSFSSHSCSSMSEQQHRKGNVAIGNKDPSVGEDSVDVVLKRIRSEAELKSLIQDNKTKLMPRSQSQETLGENPKTEHHKSFLKSAPKASQKEDSHRVKVTFGDEKTRFRLPKNWGYEDLVQEIARRFNIWRSALMFVNLLRLVPSNFVCNPPVILSGVL

SEQ ID NO: 194 - protein, 950 aa, Trifolium pratense
MEYGGGLVGDGGVFGNMVGGGGEAADMIEELLVDGCWIEASENNMMAMQSQTQTHYMSTNNNNNNNIPIGMGEGDHFNNHHHNQIECNVPTDHDDDQESGFVVGKRWWIGPRANPGPSTSVKERLVVAVGYLKEYTKNSSNNVLIQIWVPALRRRSPLLIHNHYLHESSSSAPVSVNPNTNVHVRFFRSHEYPRHQQQQYGSLFALPVFERGSGTCLGVIEFVITNQTVVNYRPQLDHLSNALEAVDFRSSHNMNIPSAVKVFEELYEAAVNEIVEVLASVCKTHNLPLALTWAPCIQQQGGGVRGKGTAGAAGCGVSVAVPTDQMNNNQMMMNCVSTVDSACYVGDMEVLGFQEVCSEYHLFNGQGIVGTAFTTTKPCFAIDITAFSKAEYPLAHHANMFGLHAAVAIPLRSVYTGSAADFVLEFFLPKDCRDPEQQKHMLNSLSLVVQQACRSLHLHVVMDDTDNANHHDHDQDQFTFPTTTTTNNYMPSSASDAATASLSQVDATSGCSTKDTSSSCSWIAHMMEAQHKGKGVSVSLEYLQEPKEEFKVTTCNWDREREGNSVFSEFGQVLQHDQSSNSRASVEAGEESGGCGVGGGRRSSSSSSGRKSGDKRRTKAEKTISLPVLRQYFAGSLKDAAKSIGVCPTTLKRICRQHGITRWPSRKIKKVGHSLKKLQLVIDSVQGAEGAIQIGSFYASFPELSTATANGGGGGGGGDHNNVNNSFYNSHGDGVVNGLKSPPSACSQTHAAGNKLITANIINGDHHHHHHHVMMTENPAAPLAADALMMHGSNINIQNYQQLQEDQDTKQLLLHFNNNNQTLPPRPTAGAWNNNNNSSSSGLLERGAFRVKATFADEKIRFSLQAMWGFRDLQLEIARRFNLNDMNNLVLKYLDDEGEWVVLSCDADLEECKDLHTSSHTRTIRLSLFQASPLNLPNNFVRNSSSSPSS

SEQ ID NO: 195 - skipped

SEQ ID NO: 196 - protein, 898 aa, Trifolium subterraneum
MGDGAAVTSSATMMEGPSQDENSMDFDYMSELLLDGCWLEASADGSEFLLQSSPFSNPIFDPSFSWPSLENTEPTRNEDGHVGVEQESQIIVNNAGSSDRQQCEFETRSGEGVSRLWIPPTPNPGLGGSSITEKLIRALKWIKDFNRNKDMLIQIWVPVNRGDDRPILRANDLPFSLESRSLNLAKYREISVRYQFSAEEKDSKELVAGLPGRVYRDKIPEWTPDVRFFRSEEYPRVDHAQECDIHGTLAVPVFEQGSRTCLGVIEVVMTTQQSNYGRELETVCKALEVVDLRSSGHSSLQNVKACDKSYETALPEIQEVLRSACEMHKLPLAQTWISCIQQGKDGCRHSDDNYANCISPVDYACYVGDSSVRFFHEACMEHHLLKGQGVAGGAFVTNQPCFSADITSLSKTDYPLSHHARLFGLRAAVAIRLRSIYSTSDDYVLEFFLPVDCNDIEEQKNMLTSLSMIIQRVCRSLRVITDKELDKDHLSSNEVMAVTDGQFATNAVWSESQHRGMAASLGGEEKFSETMGRKFSEQRRQQETLTLKGDLDCGRVRSPSVEGTFLSSLGINRTGEKRRAKAEKTITLQVLRQYFAGSLKDAAKNIGVCTTTLKRICRQHGIKRWPSRKIKKVGHSLQKLQLVIDSVQGASGSFQIDSFYSKFSDLSSPRTSLISTLNQIDNQVSLSTLPDPDSLSPEGASKSPSSSCSQSSFSSHSCSSMSEQQHHKGDVAAGNKDPSVGEDSVDVVLKRIRSEAELKSLIQDNKTKLMPRSQSQETLGENPKTEHHKSLLKTARKASQKEDSHRVKVTFGDEKTRFRLPKKWGYEDLVQEIARRFNVSEMSKFDIKYLDDDYEWVLLTCDADLEECIDVSQSSETSTIKLCLQPSSNFIRSSLEFR

SEQ ID NO: 197 - protein, 934 aa, Trifolium subterraneum
MEYGGGLVGDGGVFGNMVGGGGEADMIEELLVDGCWIEASENNMMAMQSQTHYMTNNNIPINGMGEGDHFNNHHHNQIECNVPTDHDDDQESGFVVGKRWWIGPRANPGPSTSVKERLVVAVGYLKEYTKNSSNNVLIQIWVPALRRRSPLIHNHYLHESSSSAPVSVNPNTNVHVRFFRSHEYPRHQQQQYGSLFALPVFERGSGTCLGVIEFVITNQTVVNYRPQLDHLSNALEAVDFRSSHNINIPSAVKVFEELYEAAVNEIVEVLASVCKTHNLPLALTWAPCIQQQGGGVRGKGTAGAAGCGVSVTAPTDQMNNNNQMMMNCVSTVDSACYVGDMEVLGFQEVCSEYHLFNGQGIVGTAFTTTKPCFAIDITAFSKAEYPLAHHANMFGLHAAVAIPLRSVYTGSAADFVLEFFLPKDCRDPEQQKHMLNSLSLVVQQACRSLHLHVVMDDTDNANHHDHEQDQFTFPTTTNNYMPSSASDAATASLSQVDATSGCSTKDTSSSCSWIAHMMEAQHKGKGVSVSLEYLQEPKEEFKVTTCNWDREREGNSVFSEFGQVLQHDQSSNSRASVEAGEESGGCGVGGGRRSSSSSSGRKSGDKRRTKAEKTISLPVLRQYFAGSLKDAAKSIGVCPTTLKRICRQHGITRWPSRKIKKVGHSLKKLQLVIDSVQGAEGAIQIGSFYASFPELSTATANGGGGDHSNVNNSFYNSHGDGVVTGLKSPPSSCSQTHAAGNKLITANTINGEHHHHVMMTENPTGPSAADALMMHGSNINIQNYQQLQEDQDTKQLLLHFNNNNNQTLPPRPTGGAWNNNNSSSSGLLERGAFRVKATFADEKIRFSLQAMWGFRDLQLEIARRFNLNDMNNLVLKYLDDEGEWVVLSCDADLEECKDLHTSSHTRTIRLSLFQASPLNLPNNFVRNSSSSPSS

SEQ ID NO: 198 - protein, 784 aa, Triticum urartu
MSSEGDLDLLEQLLSGDNAWLEVAPNTSRSPNFFASPSTFLSDATATTTTTPAGANSTLWIPPASSTVRQRFEQALDYIKQMQRDAGMLVQLWVPQKNCDGKLVLTTSGQPFTLDNTSDRLMQFRDVSTHYHFSADVGSEASPVGLPGRVFIGKLPEWSPDVRLFTSYEYPRVKYAQDLDVHGTMGLPVFEKGSYSCLGVMELIMTRQKLNFTSEINDICRALQAVNLRSTEVSSTPRATKFNSASYKDALPEILEVLRAACVTHNLPLAQTWVTCAQQGKGGSRHTDENYPYCISTIDTACYVNDPQMQNFHDSCSDHHLLRGQGVAGKAFETNQPCFLPDIGSSAKEHYPLSHHAKIFNLKGAVAIRLRCTRTGTADFVLEFFLPTNCEALEEQKAVLDSLSGTMRSACRTLRVVTDKEIGDEEMLEVNELNSFGPQGKNKVEELSFGNQATEHREEASWTSLARTSKESDLAELSMHGMLSPVGQGLSPAGAQTSAQGSKGKRRTKTEKTVSLPVLRQYFAGSLKDAARSLGVCPTTLKRICRQHGINRWPSRKIKKVDHSLRKLQQIIDSVHGGETAFQLNTLYKDLTNTSVSSDNNLSGSVTVPPHKQSNLTDFEGHRHHRLSSNVPSTSHSHSSCSQSSDSSPSSCSGGSTKHPPQAGVDLLMSGNPVNHSPVQTLQTENASTRGHFPVQEAPDLLHNLNQQALGGQHSSRSPSPPKQNADAGWISLNKVKPKWCCLYFREKADHVYNAKRTVGIHVYLHGSKNISIGMKGRTYQDHC

SEQ ID NO: 199 - protein, 703 aa, Vigna angularis
MEYGGFSDIFAPETEFMDELFVEGCWVETRVGCGTEASKWNRSMESNGAHIIFEEESEAESLMVGKRWWIGPRGNPGPSSSVKERLVVAVGYLKEYAKNSNMVIQVWVPARRGCEVGIHHHQDFPYTLDYTNNGDATGSFQFHEDWLSDHWPPNIRFLRTHDYTRLHHYDLRPGSLALPVFQRGTGICLGVVDILMPNNVNPDLHNLQGVDFRTPSLQNFIPPAMTVKVPFTTSKPCFANDITAFTKAEYPLAHHANMFGLHAAVAIPLRSVSSDFVLEFFLPKDCHDTQDQKQILNSLSMLVQQACRSLHVVLDKEEEEEELVSHHHHHHSKEMESSSWIAHMMEAQQKGKGVSVSLEYLQEPKQEFKVTTNGNEQVFSDLEGTSGAGVGGRRGGRKSGDKRRTKAEKTISLPVLRQYFAGSLKDAAKSIGVCPTTLKRICRQHGITRWPSRKIKKVGHSLRKLQLVIDSVQGAEGAIQIGSFYTSFPELSSANGVSESPKINSDNSKFYSENGLFSNQGVTSTSSCSQSCNPSLNQSTTLINSNNNNIPEIILMSDKQSVVGASMQVHHPPIPISIPIPIQSLDALPPLPQTSSVWNTGGGTFRVKATFGDEKIRFSLQPNCGFRDLQMEIARRFNLKEMSKIQVKYLDDAQEWVLLTCDADLEECKDINRSSQSRTVRLFLFHASPLNHSTNAFGSTSPT

SEQ ID NO: 200 - protein, 902 aa, Vigna angularis
MRDGGVTSSSASMMEAPPPDGTITTTTMDFDYMGELFLDGCWLEASVDGSDFLPQSPSFSNPLFDPSFSWPALETNHDESQGAAFGTQQEGHNNNNNMVNVVVGGGQELQPETITTEGASEGVRRWRFAPTPAPAPGPSIMEKLIRALMWIKDYNRNKNMLIQIWVPVHRGGRPILAANDILFSLDSRSVNLAKYREISVRYEFSAEEGEVKELVPAEKGGSKELLPGLPGRVFRDKVPEWTPDVRFFRSDEYPRVDHAQEYDVRGSLAVPIFEQGSKMCLGVIEVVMTTQQINYTPELESVCKALEAVDLRSSKQLSIHNVKACNRSYEAVLPEIQLVLRSACEMHRLPLAQTWIPCVQQGKEGCRHSEDNYLLCISPVEQACYVGDPKIKPFHESCTEHHLLKGEGVAGGAFVTNQPCFSDDITSLSKKDYPLSHHARLFGLRAAVAIRLRSILNDTDDFVLEFFLPVDCIDSEEQRKMLTSLSIIIQKLCHSLRVISDKELEEANLSIDEMISSVEGGFDRTVICEELQHKGTVASLDTEEKISETTGRKFSDPRQQQESPILKGNFDCVRECSTSVQGNLSSVRMSKMGERRRAKAEKTITLQVLRQYFAGSLKDAAKNIGVCTTTLKRICRQHGIKRWPSRKIKKVGHSLQKLQLVIDSVQGASGAFQIDSFYSNFPELASPNLSGTSMFSTLNQTDNPNSISTQPDPGSLSPEGTSKSPSSSCELQQQHHTTNIAGNKDSTMAGEDSADVALKRIRSEAELKSLNEDKAKLLSRSLSQETLGEHPKNQYERPLLKTSSKVDAHRVKVTYGDEKARFRMPKNWGYEDLVQEIGRRFNVSEMSKFDVKYLDDDSEWVLLTCDADLEECIDVCRSSEKATIKLSLQISSHSLRSSLEFR

SEQ ID NO: 201 - protein, 748 aa, Vigna angularis
MEYGGLVQNCGFGSLWECDSASEEDSIEEVLAEGCWVETSGVGSCEAQYIGSSEAEMEVELRKRWWIGPNKVNSSVKDRLVVAVCYLRECTKNSNLMIQVWVPLRRGLVAGPEYLTRNLDDWVAVEMNMNVNMNSARDVSLRFYRSQEYPRLPYYVDLPGSLALPVFERGTDTCLGVIQILTPPCDTVNYCPQLLNNNLLCNPFQFLPYHSMPCLVTQSEQAFEEVYEAAVNEIVEVMRCVCRAQNVALALSWAPCCIQQGGKCGGYGHSTENHLSTVERACFVGDAQVLGFKEASSQHHLLRGQGIVGTAFTTAKPCFAIDVAAFTRAQYPLAHHANIFGLHAAVAIPLRSLYTDFVVEFFLPKDCRDRENQSHFLSSISLILQQSCRTLHVVMGDEFTLPPLPPPPPPQPQPYVNNKEEIVMSEKSDSQWQAEACGSWIAHMMEAQAQEQKAKGVCVSLEYLEEAKEEFKVTGKCRWESGSSGAYDAVEVQEQHVFGDESQTQTQTQNFGGRRGRKSGEKRRTKAEKTISLPVLRQYFAGSLKDAAKSIGVCPTTLKRICRQHGITRWPSRKIKKVGHSLKKLQLVIDSVQGAEGAIQIGSFYNSFPELSSATSQSKNNNSSNNNSSSLYGHSPPSSSSPSTVPPQQQHLYFSTPNVSQTGLRVKATFGDEKIRFSLQPKWGFRDLEVEIGRRFNVKDLGNLVIKYLDDEGEWVVLACDGDLEECKDLHTTYESRTIRLALFQPSP

SEQ ID NO: 202 - protein, 711 aa, Vigna angularis
MEYGGFSDIFAPETEFMDELFVEGCWVETRVGCGTEASKWNRSMESNGAHIIFEEESEAESLMVGKRWWIGPRGNPGPSSSVKERLVVAVGYLKEYAKNSNMVIQVWVPARRGCEVGIHHHQDFPYTLDYTNNGDATGSFQFHEDWLSDHWPPNIRFLRTHDYTRLHHYDLRPGSLALPVFQRGTGICLGVVDILMPNNVNPDLHNLQGVDFRTPSLQNFIPPAMTVKLGGQGVVGTAFTTSKPCFANDITAFTKAEYPLAHHANMFGLHAAVAIPLRSVSSDFVLEFFLPKDCHDTQDQKQILNSLSMLVQQACRSLHVVLDKEEEEEELVSHHHHHHSKEMESSSWIAHMMEAQQKGKGVSVSLEYLQEPKQEFKVTTNGNEQVFSDLEGTSGAGVGGRRGGRKSGDKRRTKAEKTISLPVLRQYFAGSLKDAAKSIGVCPTTLKRICRQHGITRWPSRKIKKVGHSLRKLQLVIDSVQGAEGAIQIGSFYTSFPELSSANGVSESPKINSDNSKFYSENGLFSNQGVTSTSSCSQSCNPSLNQSTTLINSNNNNIPEIILMSDKQSVVGASMQVHHPPIPISIPIPIQSLDALPPLPQTSSVWNTGGGTFRVKATFGDEKIRFSLQPNCGFRDLQMEIARRFNLKEMSKIQVKYLDDAQEWVLLTCDADLEECKDINRSSQSRTVRLFLFHASPLNHSTNAFGSTSPT

SEQ ID NO: 203 - protein, 917 aa, Vigna angularis
MMRDGGVTSSSASMMEAPPPDGTITTTTMDFDYMGELFLDGCWLEASVDGSDFLPQSPSFSNPLFDPSFSWPALETNHDESQGAAFGTQQEGHNNNNNMVNVVVGGGQELQPETITTEGASEGVRRWRFAPTPAPAPGPSIMEKLIRALMWIKDYNRNKNMLIQIWVPVHRGGRPILAANDILFSLDSRSVNLAKYREISVRYEFSAEEGEVKELVPAEKGGSKELLPGLPGRVFRDKVPEWTPDVRFFRSDEYPRVDHAQEYDVRGSLAVPIFEQGSKMCLGVIEVVMTTQQINYTPELESVCKALEAVDLRSSKQLSIHNVKACNRSYEAVLPEIQLVLRSACEMHRLPLAQTWIPCVQQGKEGCRHSEDNYLLCISPVEQACYVGDPKIKPFHESCTEHHLLKGEGVAGGAFVTNQPCFSDDITSLSKKDYPLSHHARLFGLRAAVAIRLRSILNDTDDFVLEFFLPVDCIDSEEQRKMLTSLSIIIQKLCHSLRVISDKELEEANLSIDEMISSVEGGFDRTVICEELQHKGTVASLDTEEKISETTGRKFSDPRQQQESPILKGNFDCVRECSTSVQGNLSSVRMSKMGERRRAKAEKTITLQVLRQYFAGSLKDAAKNIGVCTTTLKRICRQHGIKRWPSRKIKKVGHSLQKLQLVIDSVQGASGAFQIDSFYSNFPELASPNLSGTSMFSTLNQTDNPNSISTQPDPGSLSPEGTSKSPSSSCGQSSISSHSCSSMSELQQQHHTTNIAGNKDSTMAGEDSADVALKRIRSEAELKSLNEDKAKLLSRSLSQETLGEHPKNQYERPLLKTSSKVDAHRVKVTYGDEKARFRMPKNWGYEDLVQEIGRRFNVSEMSKFDVKYLDDDSEWVLLTCDADLEECIDVCRSSEKATIKLSLQISSHSLRSSLEFR

SEQ ID NO: 204 - protein, 775 aa, Vigna angularis
MGAGWKPLLMDLTSCRKVLPFPIPSLTLHSPGQPWRLTTMNPRVLLLEHNKKATTTTTTWYEFSAEEGEVKELVPAEKGGSKELLPGLPGRVFRDKVPEWTPDVRFFRSDEYPRVDHAQEYDVRGSLAVPIFEQGSKMCLGVIEVVMTTQQINYTPELESVCKALEAVDLRSSKQLSIHNVKACNRSYEAVLPEIQLVLRSACEMHRLPLAQTWIPCVQQGKEGCRHSEDNYLLCISPVEQACYVGDPKIKPFHESCTEHHLLKGEGVAGGAFVTNQPCFSDDITSLSKKDYPLSHHARLFGLRAAVAIRLRSILNDTDDFVLEFFLPVDCIDSEEQRKMLTSLSIIIQKLCHSLRVISDKELEEANLSIDEMISSVEGGFDRTVICEELQHKGTVASLDTEEKISETTGRKFSDPRQQQESPILKGNFDCVRECSTSVQGNLSSVRMSKMGERRRAKAEKTITLQVLRQYFAGSLKDAAKNIGVCTTTLKRICRQHGIKRWPSRKIKKVGHSLQKLQLVIDSVQGASGAFQIDSFYSNFPELASPNLSGTSMFSTLNQTDNPNSISTQPDPGSLSPEGTSKSPSSSCGQSSISSHSCSSMSELQQQHHTTNIAGNKDSTMAGEDSADVALKRIRSEAELKSLNEDKAKLLSRSLSQETLGEHPKNQYERPLLKTSSKVDAHRVKVTYGDEKARFRMPKNWGYEDLVQEIGRRFNVSEMSKFDVKYLDDDSEWVLLTCDADLEECIDVCRSSEKATIKLSLQISSHSLRSSLEFR

SEQ ID NO: 205 - protein, 821 aa, Vigna angularis
  REGION 1..821: note = var. angularis
MEYGGFSDIFAPETEFMDELFVEGCWVETRVGCGTEASKWNRSMESNGAHIIFEEESEAESLMVGKRWWIGPRGNPGPSSSVKERLVVAVGYLKEYAKNSNMVIQVWVPARRGCEVGIHHHQDFPYTLDYTNNGDATGSFQFHEDWLSDHWPPNIRFLRTHDYTRLHHYDLRPGSLALPVFQRGTGICLGVVDILMPNNVNPDLHNLQGVDFRTPSLQNFIPPAMTVKGFDELYQGALNEIVQVLTCVCKAHELPLALTWAPCIQQGKSGCGHSNDENYVSTVDPACFVADVDVLGFLEACSEYHLLGGQGVVGTAFTTSKPCFANDITAFTKAEYPLAHHANMFGLHAAVAIPLRSVSSDFVLEFFLPKDCHDTQDQKQILNSLSMLVQQACRSLHVVLDKEEEEEELVSHHHHHHSKEMESSSWIAHMMEAQQKGKGVSVSLEYLQEPKQEFKVTTNGNEQVFSDLEGTSGAGVGGRRGGRKSGDKRRTKAEKTISLPVLRQYFAGSLKDAAKSIGGTWETHTCSFIFYQFPRYYYSVAIHNSLLLIAVCPTTLKRICRQHGITRWPSRKIKKVGHSLRKLQLVIDSVQGAEGAIQIGSFYTSFPELSSANGVSESPKINSDNSKFYSENGLFSNQGVTSTSSCSQSCNPSLNQSTTLINSNNNNIPEIILMSDKQSVVGASMQVHHPPIPISIPIPIQSLDALPPLPQTSSVWNTGGGTFRVKATFGDEKIRFSLQPNCGFRDLQMEIARRFNLKEMSKIQVKYLDDAQEWVLLTCDADLEECKDINRSSQSRTVRLFLFHASPLNHSTNAFGSTSPT

SEQ ID NO: 206 - protein, 920 aa, Vigna radiata
  REGION 1..920: note = var. radiata
MMRDGGVTSSSASMTEAPPPDGTITTKTMDFDYMGELFLDGCWLEASVDGSDFLPQSPSFSNPLFDPSFSWPALETNHNESQGAAFGTQQEGHNNNMVNVVVGCGDGGGQELQPETVTTEGTSEGVKRWRFAPTPAPAPGPSIMEKLIRALMWIKDYNRNKNMLIQIWVPVHRGGRPILAANDILFSLDSRSVNLAKYREISVRYEFSAEEGEVKELVPAEKGGSKELLLGLPGRVFRDKVPEWTPDVRFFRSDEYPRVDHAQEYDVRGSLAVPIFEQGSKMCLGVIEVVMTTQQINYTPELESVCKALEAVDLRSSKQLNIHNVKACNRSYEAVLPEIQLVLRSACEMHRLPLAQTWIPCVQQGKEGCRHSEDNYLLCISPVEHACYVGDPKIRPFHESCTEHHLLKGEGVAGGAFITNQPCFSDDITSLSKKDYPLSHHARLFGLRAAVAIRLRSILNDTDDFVLEFFLPVDCSDSEEQRKMLTSLSIIIQRLCRSLRVISDKELEEANSSIDEMIFLADGGFDRTVICEELQHKGTVALWNTEEKLSETTGRKFSDPRQQQQESLNFKGNLDCVRECSTSVQGNLSSVGMSKMGERRRAKGEKTITLQVLRQYFAGSLKDAAKNIGVCTTTLKRICRQHGIKRWPSRKIKKVGHSLQKLQLVIDSVQGASGAFQIDSFYSNFPELASPNLSGTSMFSTPNQTDNPNSISTQPDPGSLSPEGTSKSPSSSCGQSSISSHSCFSMSELRQQHHTTDISGNKDSTMAGEDSLDVALKRIRSEAELKSLNQDKAELLPRSLSQETLGEHPKNQYERPLLKTSSKVDAHRVKVTYGDEKTRFRMPKNWGYEDLMQEIGRRFNVSEMSKFDVKYLDDDSEWVLLTCDADLEECIDVCRSSENATIKLSLQISSHSLRSSLEFR

SEQ ID NO: 207 - protein, 783 aa, Vigna radiata
  REGION 1..783: note = var. radiata
MEYGGFSDIFAPETEFMDELFAEGCWVETRVGCGTEASKWNRSMESNGAHIIFEEESEAESLMVGKRWWIGPRGNPGPSSSVKERLVVAVGYLKEYAKNSNMVIQVWVPARRGCEVGIHHHQDFPYTLDYISNGDATRSFQFHEEWLSDHWPPNIRFLRTHDYPRLHHYDLRPGSLAIPVFQRGTGICLGVVDILMPNNVNPDLHNLQDVDFRSPSLQNFIPSAMTGFDELYQGALNEIVQVLTCVCKAHELPLALTWAPCIQQGKSGCGHSNDENYVSTVDPASFVADVDVLGFLEACSEYHLLGGQGVVGTAFTTSKPCFANDITAFTKAEYPLAHHANMFGLHAAVAIPLRSVSSDFVLEFFLPKDCHDTQDQKQILNSLSMLVQQACRSLHVVLDKEEEEELVSHHHHHHSKEMESSSWIAHMMEAQQKGKGVSVSLEYLQEPKQEFKVTTNCNEQVFSDLEGTGGAGVGGRRGGRKSGDKRRTKAEKTISLPVLRQYFAGSLKDAAKSIGVCPTTLKRICRQHGITRWPSRKIKKVGHSLRKLQLVIDSVQGAEGAIQIGSFYTSFPELSANGVSESPKINSDNSKFYSENGLFSNQGVTSTSSCSQSCNPSLNQSTTLINSNNNNNPEIILMSDKQSGASMQVHHPPIPISIPIPIQSLDALPPLPQTSSVWNTDGGTFRVKATFGDEKIRFSLQPNCGFRDLQMEIARRFNLKEMSKIQVKYLDDAQEWVLLTCDADLEECKDINRSSQSRTVRLFLFHASPLNHSTNAFGSTSPT

SEQ ID NO: 208 - protein, 904 aa, Vigna radiata
  REGION 1..904: note = var. radiata
MMRDGGVTSSSASMTEAPPPDGTITTKTMDFDYMGELFLDGCWLEASVDGSDFLPQSPSFSNPLFDPSFSWPALETNHNESQGAAFGTQQEGHNNNMVNVVVGCGDGGGQELQPETVTTEGTSEGVKRWRFAPTPAPAPGPSIMEKLIRALMWIKDYNRNKNMLIQIWVPVHRGGRPILAANDILFSLDSRSVNLAKYREISVRYEFSAEEGEVKELVPAEKGGSKELLLGLPGRVFRDKVPEWTPDVRFFRSDEYPRVDHAQEYDVRGSLAVPIFEQGSKMCLGVIEVVMTTQQINYTPELESVCKALEACNRSYEAVLPEIQLVLRSACEMHRLPLAQTWIPCVQQGKEGCRHSEDNYLLCISPVEHACYVGDPKIRPFHESCTEHHLLKGEGVAGGAFITNQPCFSDDITSLSKKDYPLSHHARLFGLRAAVAIRLRSILNDTDDFVLEFFLPVDCSDSEEQRKMLTSLSIIIQRLCRSLRVISDKELEEANSSIDEMIFLADGGFDRTVICEELQHKGTVALWNTEEKLSETTGRKFSDPRQQQQESLNFKGNLDCVRECSTSVQGNLSSVGMSKMGERRRAKGEKTITLQVLRQYFAGSLKDAAKNIGVCTTTLKRICRQHGIKRWPSRKIKKVGHSLQKLQLVIDSVQGASGAFQIDSFYSNFPELASPNLSGTSMFSTPNQTDNPNSISTQPDPGSLSPEGTSKSPSSSCGQSSISSHSCFSMSELRQQHHTTDISGNKDSTMAGEDSLDVALKRIRSEAELKSLNQDKAELLPRSLSQETLGEHPKNQYERPLLKTSSKVDAHRVKVTYGDEKTRFRMPKNWGYEDLMQEIGRRFNVSEMSKFDVKYLDDDSEWVLLTCDADLEECIDVCRSSENATIKLSLQISSHSLRSSLEFR

SEQ ID NO: 209 - protein, 732 aa, Vigna radiata
  REGION 1..732: note = var. radiata
MEYGGLVQNCGFGSLWECDSASEEDSIEEVLAEGCWVETSGVGSCEAQYIGSSEAEMEVELRKRWWIGPNKANSSVKDRLVVAVCYLRECTKNSNLMIQVWVPLRRGLVAGPEYLTRNLDDWVAVEMNMNVNMNSARDVSLRFYRSQEYPRLPYYVDLPGSLALPVFERGTDTCLGVIQILTPPCDTINYCPQLLNNNLLCNPFQAFEEVYEAAVNEIVEVMRCVCRAQNVALALSWAPCCIQQGGKCGGYGHSTENHLSIVERACFVGDAQVLGFKEASSQHHLLRGQGIVGTAFTTAKPCFAIDVAAFTRAQYPLAHHANIFGLHAAVAIPLRSLYTDFVVEFFLPKDCRDREHQSHFLSSISLILQQSCRTLHVVMGDEFTLPPLPPPPPPQPQPYVNNKEEIVMSEKSDSQWQAEACGSWIAHMMEAQAQEQKAKGVCVSLEYLEEAKEEFKVTGKCRWESGSGSAYDAVEVQEQHMFGDESQTQTQTQNFGGRRGRKSGEKRRTKAEKTISLPVLRQYFAGSLKDAAKSIGVCPTTLKRICRQHGITRWPSRKIKKVGHSLKKLQLVIDSVQGAEGAIQIGSFYNSFPELSSATSQSKNNNSSNNNSSSLYGHSPPSSSSPSTVPPQQQHLYFSTPNVSQTGLRVKATFGDEKIRFSLQPKWGFRDLEVEIGRRFNVKDLGNLVVKYLDDEGEWVVLACDGDLEECKDLHTTYESRTIRLALFQPSP

SEQ ID NO: 210 - protein, 872 aa, Zea mays
MQCVRDELCRAGSEESVTCICMEEGGDPQLPSISVARTTSEGAGAVDLDLLEQLLSGDNGWLEVVSRSPNSVAFPPPSAFFSADATATTVTTTAAPAANASWLIQTGGASTPSVRERFSQALSYIRDTQSDGDVLVQLWVPVNRDDGKLVLTTSGQPFTLDHRSDSLIRFREVSTKYQFPADVRSGESPGLPGRVFIGRLPEWSPDIRCFTSYEYARVTDAKYLDVHGTMGLPVFEKRSYSCLGVIELIMTKQKLNFTSELNTICSALQAVNLRSTEVSSIPRKKFSTASYKDALPEILEVLRAACLTHKLPLAQTWVTCTQQGKRGSRHSDENYRYCISTIDEACFVNEAEMRGFHEACSEHHLLRGEGVAGKALTTNQPCFLPDIGSSTKLEYPLSHHAKIFRLKGAVAIRLRCTRTGIADFVLEFFLPTDCEALEEQKTVLDSLSGTMRSVCQTLRVVTDREMEGEAALEMNELNSFTPPEKDKDELSFGGNSADRRGASWTSLAGTSQQEPELAALRMHGTFSPVGQGPSLSGVQATAEGSKTKRRTKAEKTVSLQVLRQYFAGSLKDAARSLGVCPTTLKRICRQHGITRWPSRKIKKVDHSLRKLQQIIDSVHGAETAFQLNTLYKDLTDTSISSDNNLSGSVTVPPTNQSNLTDFNKHQPHKSSSNMPSTSHSHSSCSHGSQSSPSCSVGATEHAQQGIIDLMKSENPVKDSSIQTMQTENTSLYEHFSVHEAPIDLLQDVTEKANGAHHSSRSLSSPNPKQNTDANMRVKATFGSEKVRFRLNPECNFQGLKHELAKRLSIVDTNPLVLKYLDDDSEWVLMTCDADLQECLHVYKLADIQTIKISVHLAVSPATRVTAGHTGLS

SEQ ID NO: 211 - protein, 851 aa, Zea mays
MEEGGDPQLPSISAPRTTSEGAGGVDLDLLEQLLSGDNGWLEVVSRSPNSVAFPPLSAFFSADATATTVTTAAPAANASWWIQTGGASPSSVEERFSQALSYIRDTQSDGDVLVQLWVPVNRDDGKLVLTTSEQPFTLDHRSDSLLRFREVSTKYQFSADVKSGDSPGLPGRVFIGRLPEWSPDIRYFTSYEYPRVRDAQYLDVHGTMGLPVFEKGSYNCLGVIELIMTRQKINFTSELNTICSALQAVNLRSTEVSSIPRIKFSTASYKDALPEILEVLRAACLTHKLPLAQTWVTCAQQGKRGSRHSDENYRYCISTIDEACFVNEAEMRGFHEACSEHHLLRGEGVAGKAFTTNQPCFLPDIGSSTKLEYSLSHHAKIFKLKGAVAIRLRCTRTGTADFVLEFFLPTDCEALEEQKSVLDSLSGTMRSVCQTLRVVTDREMEDETVLEMNELNSFTPHGKDKVELSFGCNSADRRGEASWTSLAGTSQQESELAALRMHGMFSPGGQGPSLSGVQATAEGSKAKRRTKAEKTVSLQILRQYFAGSLKDAARSLGVCPTTLKRICRQHGITRWPSRKIKKVDHSLRKLQQIIDSVHGAETAFQLNTLYKDITNTSISSDNNLSGSVTVPPTNQSNLTDVNKHQPHKSSSNVPSTSHSHSSCSHSSESSPSCSGGATKHAQQGIIDQMKSENPVKDSSIQTLQTENTSLFEHFSVNETPIDLLQDVTEKANGGHHSSRSPSSPNPKQNTDANMRVKATFGSEKVRFRLNPECNFQELKHEIAKRLSIVDTNPLVLKYLDDDSEWVLMTCDADLQECLHVYKLAGIQTIKISVHLAVSPATRVTTGHTGLS

SEQ ID NO: 212 - protein, 521 aa, Zea mays
MEALKIARKTTSKLPAHTLGFLPPAFPRGHSHFAHCLCAKHDTGKGVPWPDAGSKGDLNLTDECAQGHHRKAGSLSSTLSLDNGDGAGETNDAEKPVLKGELPASAWKREETHSFRASPHAPRPKARGVDLDLLEQLLSDDNGWLEVVSRSPNSVAFPPLSAFFSADATATTVTTAATAANASWWIQTGGASPSSVEEQFSQAMSYIRDMQSDGDVLVQLWVPVNHDDGKLVLTTSEQPFTLDHRSDSLLRFREVSTKYQFSADVKSGDSPGLPGRVFISRLPEWQKINFTSELNTICSALQFSTASYKDALPEILEVLRAACLTHKLPLAQTWVTCAQQGKRGSRHSDENYRYCISTIDEACFVNEAETRGFHETCSEHHLLHYEALEEQKTVLDSLSGTMRSVCQTLRVVTDREMEDEAVLEMNELNSFTPHGKDKVELSFGGNSADRRGEASWTSLAGTSQQESELAALRMHGMFSPGGRVHLYLVFRQLLKVARQKGVQRPRRPLVCRFFGSTSLVA

SEQ ID NO: 213 - protein, 535 aa, Zea mays
MEEGGDPQLPSISARTTSEGAGGVDLDLLEQLLSDDNGWLETGGASPSSVEEQFSQALSYIRDTQSDGDVLVQLWVPVNHDDGKLVLTTSEQPFTLDHRSDSLLRFREVSTKYQFSANVKSGDSPGLSGRVFIGRLPEWSPDIRYFTSYEYPRVRDAQYLDVHGTMGLPVFEKGSYNCLGVIELIMIRQKINFTSELNTICSALQFSTASYKDALPEILEVLRAACLTHKLPLAQTWVTCAQQGKRGNRHSDENYRYCISTIDEACFVNEAEMRGFHETCSEHHLLRGEGLKGAVAIRLRCTRTGTTDFVLEFFLPTDCEALEDQNIVLDSLSGTMRSVCQTLRVVTNREMEDEAVLEMNELNSFTPHGKDKVELSFGGNSADRRGEASWTSLAGTSQQESELAALRMHGMFSPGGQGPSLSGVQATAEGSKAKRRTKAEKTVSLQILRQYFAGSLKDAARSLGGDNSRSAGIMSLSRLCVYGSSSITYVLSARGTSGELVLFVRRPEMVLDYGGIQPLLFNSLSSLTKWMKMEI

SEQ ID NO: 214 - protein, 902 aa, Zea mays
MEQAPQTHGGGGLLACGVMEDVAVGDLDLMEELFMAAPGFDFSDFSQPGAGGESPGVCFSPLFDICSTTTTATPPPPPPSGDDNRDQPTPPRRGWVFQPRLEVDATVKERLRRALERIASLSQTQPGELLAQVWVPTVIGDRQVLTTCGQPFWLDCRNERLANYRTVSMKYQFSADETARTDLGMPGRVFVGRVPEWTPDVRYFSTEEYPRVHHAQYFDIRGSVALPIFEPRSRVCLGVVELVMTTEKVNYNAEIQNICSALKEVDLRSSDVSSDSRAKVTDTSYRAIIPEIVDVLRTVCETHKLPLAQTWIPCICQAKRGSRHTDEKLKYCVSTLDEACYVRDLNVNGFHEACSEHHLFRGEGVVGRAFATNEPCFSEDITASSKIQYPLSHHAKLFSLRAAVAIRLRSISTGSLDYVLEFFLPVDCIEIEEQRAMLNSLSITIQQTCYTLRVVSLKELVDEGSIETSALTPPEYDKSMHENIDEVCSGIGVPARTASLETSEEVSSWIASLVCAQNKGVKEMDGDLPFGFSKQEDEGFSVTAGWHTSPVIEPEGSIFSGFKQHEEYKVKEVTCLRDPSSSNLEKTVEKRRTKMEKTVSLEELRKHFAGSLKEAAKNLGVCPTTLKRICRQHGINRWPSRKIKKVGHSLKKLQMVIDSVHGSEGTVQLSSLYENFTKTTWSERELQGDATYPLSEEKGPLEPSVPDRYCEGRFTSHTSGSNSLSPSCSQSSNSSHGCSSGSKSQQHVSAPQLAVKKEVFMEENQSSTLLKAASHAELQMLPEERLVTLPRSHSQVLLSEQKPVENITGMQMSKPDSLKIKAMYGEERCIFRLQPSWGFEKLKEEILKRFGIAREVYVDLKYLDDESEWVLLTCNADLLECIDVYKSSSTQTVRILVHSSDQ

SEQ ID NO: 215 - protein, 942 aa, Zea mays
MEQAPQTHGGGGLLACGVMEDVAVGDLDLMEELFMAAPGFDFSDFSQPGAGGESPGVCFSPLFDICSTTTTATPPPPPPSGDDNRDQPTPPRRGWVFQPRLEVDATVKERLRRALERIASLSQTQPGELLAQVWVPTVIGDRQVLTTCGQPFWLDCRNERLANYRTVSMKYQFSADETARTDLGMPGRVFVGRVPEWTPDVRYFSTEEYPRVHHAQYFDIRGSVALPIFEPRSRVCLGVVELVMTTEKVNYNAEIQNICSALKEVDLRSSDVSSDSRAKVTDTSYRAIIPEIVDVLRTVCETHKLPLAQTWIPCICQAKRGSRHTDEKLKYCVSTLDEACYVRDLNVNGFHEACSEHHLFRGEGVVGRAFATNEPCFSEDITASSKIQYPLSHHAKLFSLRAAVAIRLRSISTGSLDYVLEFFLPVDCIEIEEQRAMLNSLSITIQQTCYTLRVVSLKELVDEGSIETSALTPPEYDKSMHENIDEVCSGIGVPARTASLETSEEVSSWIASLVCAQNKGVKEMDGDLPFGFSKQEDEGFSVTAGWHTSPVIEPEGSIFSGFKQHEEYKVKEVTCLRDPSSSNLEKTVEKRRTKMEKTVSLEELRKHFAGSLKEAAKNLGVCPTTLKRICRQHGINRWPSRKIKKVGHSLKKLQMVIDSVHGSEGTVQLSSLYENFTKTTWSERELQGDATYPLSEEKGPLEPSVPDRYCEGRFTSHTSGSNSLSPSCSQSSNSSHGCSSGSKSQQHVSAPQLAVKKEVFMEENQSSTLLKAASHAELQMLPEERLVTLPRSHSQVLLSEQKPVENITGMQMSKPDSLKIKAMYGEERCIFRLQPSWGFEKLKEEILKRFGIAREVYVDLKYLDDESEWVLLTCNADLLECIDVYKSSSTQTVRILVHSSDHKLHTVFDITEDGTSVPLVQFVNSTGRRVESVGICRYEALD

SEQ ID NO: 216 - protein, 860 aa, Zea mays
MEQAPQTHGGESPGVCFSPLFDICSTTTTATPPPPPPSGDDNRDQPTPPRRGWVFQPRLEVDATVKERLRRALERIASLSQTQPGELLAQVWVPTVIGDRQVLTTCGQPFWLDCRNERLANYRTVSMKYQFSADETARTDLGMPGRVFVGRVPEWTPDVRYFSTEEYPRVHHAQYFDIRGSVALPIFEPRSRVCLGVVELVMTTEKVNYNAEIQNICSALKEVDLRSSDVSSDSRAKVTDTSYRAIIPEIVDVLRTVCETHKLPLAQTWIPCICQAKRGSRHTDEKLKYCVSTLDEACYVRDLNVNGFHEACSEHHLFRGEGVVGRAFATNEPCFSEDITASSKIQYPLSHHAKLFSLRAAVAIRLRSISTGSLDYVLEFFLPVDCIEIEEQRAMLNSLSITIQQTCYTLRVVSLKELVDEGSIETSALTPPEYDKSMHENIDEVCSGIGVPARTASLETSEEVSSWIASLVCAQNKGVKEMDGDLPFGFSKQEDEGFSVTAGWHTSPVIEPEGSIFSGFKQHEEYKVKEVTCLRDPSSSNLEKTVEKRRTKMEKTVSLEELRKHFAGSLKEAAKNLGVCPTTLKRICRQHGINRWPSRKIKKVGHSLKKLQMVIDSVHGSEGTVQLSSLYENFTKTTWSERELQGDATYPLSEEKGPLEPSVPDRYCEGRFTSHTSGSNSLSPSCSQSSNSSHGCSSGSKSQQHVSAPQLAVKKEVFMEENQSSTLLKAASHAELQMLPEERLVTLPRSHSQVLLSEQKPVENITGMQMSKPDSLKIKAMYGEERCIFRLQPSWGFEKLKEEILKRFGIAREVYVDLKYLDDESEWVLLTCNADLLECIDVYKSSSTQTVRILVHSSDQ

SEQ ID NO: 217 - protein, 643 aa, Zea mays
MGLPVFEKRSYSCLGVIELIMTKQKLNFTSELNTICSALQAVNLRSTEVSSIPRKKFSTASYKDALPEILEVLRAACLTHKLPLAQTWVTCTQQGKRGSRHSDENYRYCISTIDEACFVNEAEMRGFHEACSEHHLLRGEGVAGKALTTNQPCFLPDIGSSTKLEYPLSHHAKIFRLKGAVAIRLRCTRTGIADFVLEFFLPTDCEALEEQKTVLDSLSGTMRSVCQTLRVVTDREMEGEAALEMNELNSFTPPEKDKDELSFGGNSADRRGASWTSLAGTSQQEPELAALRMHGTFSPVGQGPSLSGVQATAEGSKTKRRTKAEKTVSLQVLRQYFAGSLKDAARSLGVCPTTLKRICRQHGITRWPSRKIKKVDHSLRKLQQIIDSVHGAETAFQLNTLYKDLTDTSISSDNNLSGSVTVPPTNQSNLTDFNKHQPHKSSSNMPSTSHSHSSCSHGSQSSPSCSVGATEHAQQGIIDLMKSENPVKDSSIQTMQTENTSLYEHFSVHEAPIDLLQDVTEKANGAHHSSRSLSSPNPKQNTDANMRVKATFGSEKVRFRLNPECNFQGLKHELAKRLSIVDTNPLVLKYLDDDSEWVLMTCDADLQECLHVYKLADIQTIKISVHLAVSPATRVTAGHTGLS

SEQ ID NO: 218 - protein, 580 aa, Zea mays
MQCVRDELCRAGSEESVTCICMEEGGDPQLPSISVARTTSEGAGAVDLDLLEQLLSGDNGWLEVVSRSPNSVAFPPPSAFFSADATATTVTTTAAPAANASWLIQTGGASTPSVRERFSQALSYIRDTQSDGDVLVQLWVPVNRDDGKLVLTTSGQPFTLDHRSDSLIRFREVSTKYQFPADVRSGESPGLPGRVFIGRLPEWSPDIRCFTSYEYARVTDAKYLDVHGTMGLPVFEKRSYSCLGVIELIMTKQKLNFTSELNTICSALQAVNLRSTEVSSIPRKKFSTASYKDALPEILEVLRAACLTHKLPLAQTWVTCTQQGKRGSRHSDENYRYCISTIDEACFVNEAEMRGFHEACSEHHLLRGEGVAGKALTTNQPCFLPDIGSSTKLEYPLSHHAKIFRLKGAVAIRLRCTRTGIADFVLEFFLPTDCEALEEQKTVLDSLSGTMRSVCQTLRVVTDREMEGEAALEMNELNSFTPPEKDKDELSFGGNSADRRGASWTSLAGTSQQEPELAALRMHGTFSPVGQGPSLSGVQATAEGSKTKRRTKAEKTVSLQVLRQYFAGSLKDAARSLGGE

SEQ ID NO: 219 - protein, 636 aa, Zea mays
MFVKKKLWTFQFTYPSSNIKQVYKILRHETAMLIYAHMTSWPLLLIVHQFSTASYKDALPEILEVLRAACLTHKLPLAQTWVTCTQQGKRGSRHSDENYRYCISTIDEACFVNEAEMRGFHEACSEHHLLRGEGVAGKALTTNQPCFLPDIGSSTKLEYPLSHHAKIFRLKGAVAIRLRCTRTGIADFVLEFFLPTDCEALEEQKTVLDSLSGTMRSVCQTLRVVTDREMEGEAALEMNELNSFTPPEKDKDELSFGGNSADRRGASWTSLAGTSQQEPELAALRMHGTFSPVGQGPSLSGVQATAEGSKTKRRTKAEKTVSLQVLRQYFAGSLKDAARSLGVCPTTLKRICRQHGITRWPSRKIKKVDHSLRKLQQIIDSVHGAETAFQLNTLYKDLTDTSISSDNNLSGSVTVPPTNQSNLTDFNKHQPHKSSSNMPSTSHSHSSCSHGSQSSPSCSVGATEHAQQGIIDLMKSENPVKDSSIQTMQTENTSLYEHFSVHEAPIDLLQDVTEKANGAHHSSRSLSSPNPKQNTDANMRVKATFGSEKVRFRLNPECNFQGLKHELAKRLSIVDTNPLVLKYLDDDSEWVLMTCDADLQECLHVYKLADIQTIKISVHLAVSPATRVTAGHTGLS

SEQ ID NO: 220 - protein, 686 aa, Zea mays
MEEGGDPQLPSISVARTTSEGAGAVDLDLLEQLLSGDNGWLEVVSRSPNSVAFPPPSAFFSADATATTVTTTAAPAANASWLIQTGGASTPSVRERFSQALSYIRDTQSDGDVLVQLWVPVNRDDGKLVLTTSGQPFTLDHRSDSLIRFREVSTKYQFPADVRSGESPGLPGRVFIGRLPEWSPDIRCFTSYEYARVTDAKYLDVHGTMGLPVFEKRSYSCLGVIELIMTKQKLNFTSELNTICSALQAVNLRSTEVSSIPRKKFSTASYKDALPEILEVLRAACLTHKLPLAQTWVTCTQQGKRGSRHSDENYRYCISTIDEACFVNEAEMRGFHEACSEHHLLRGEGVAGKALTTNQPCFLPDIGSSTKLEYPLSHHAKIFRLKGAVAIRLRCTRTGIADFVLEFFLPTDCEALEEQKTVLDSLSGTMRSVCQTLRVVTDREMEGEAALEMNELNSFTPPEKDKDELSFGGNSADRRGASWTSLAGTSQQEPELAALRMHGTFSPVGQGPSLSGVQATAEGSKTKRRTKAEKTVSLQVLRQYFAGSLKDAARSLGVCPTTLKRICRQHGITRWPSRKIKKVDHSLRKLQQIIDSVHGAETAFQLNTLYKDLTDTSISSDNNLSGSVTVPPTNQSNLTDFNKHQPHKSSSNMPSTSHSHSSCSHGSQSSPSCSVGATEHAQQGCY

SEQ ID NO: 221 - protein, 868 aa, Zea mays
MCMEQNRSSEESVTCICMEEGGDPQLPSISVARTTSEGAGAVDLDLLEQLLSGDNGWLEVVSRSPNSVAFPPPSAFFSADATATTVTTTAAPAANASWLIQTGGASTPSVRERFSQALSYIRDTQSDGDVLVQLWVPVNRDDGKLVLTTSGQPFTLDHRSDSLIRFREVSTKYQFPADVRSGESPGLPGRVFIGRLPEWSPDIRCFTSYEYARVTDAKYLDVHGTMGLPVFEKRSYSCLGVIELIMTKQKLNFTSELNTICSALQAVNLRSTEVSSIPRKKFSTASYKDALPEILEVLRAACLTHKLPLAQTWVTCTQQGKRGSRHSDENYRYCISTIDEACFVNEAEMRGFHEACSEHHLLRGEGVAGKALTTNQPCFLPDIGSSTKLEYPLSHHAKIFRLKGAVAIRLRCTRTGIADFVLEFFLPTDCEALEEQKTVLDSLSGTMRSVCQTLRVVTDREMEGEAALEMNELNSFTPPEKDKDELSFGGNSADRRGASWTSLAGTSQQEPELAALRMHGTFSPVGQGPSLSGVQATAEGSKTKRRTKAEKTVSLQVLRQYFAGSLKDAARSLGVCPTTLKRICRQHGITRWPSRKIKKVDHSLRKLQQIIDSVHGAETAFQLNTLYKDLTDTSISSDNNLSGSVTVPPTNQSNLTDFNKHQPHKSSSNMPSTSHSHSSCSHGSQSSPSCSVGATEHAQQGIIDLMKSENPVKDSSIQTMQTENTSLYEHFSVHEAPIDLLQDVTEKANGAHHSSRSLSSPNPKQNTDANMRVKATFGSEKVRFRLNPECNFQGLKHELAKRLSIVDTNPLVLKYLDDDSEWVLMTCDADLQECLHVYKLADIQTIKISVHLAVSPATRVTAGHTGLS

SEQ ID NO: 222 - protein, 861 aa, Zea mays
MQCVRDELCRAGSEESVTCICMEEGGDPQLPSISVARTTSEGAGAVDLDLLEQLLSGDNGWLEVVSRSPNSVAFPPPSAFFSADATATTVTTTAAPAANASWLIQTGGASTPSVRERFSQALSYIRDTQSDGDVLVQLWVPVNRDDGKLVLTTSGQPFTLDHRSDSLIRFREVSTKYQFPADVRSGESPGLPGRVFIGRLPEWSPDIRCFTSYEYARVTDAKYLDVHGTMGLPVFEKRSYSCLGVIELIMTKQKLNFTSELNTICSALQAVNLRSTEVSSIPRKKFSTASYKDALPEILEVLRAACLTHKLPLAQTWVTCTQQGKRGSRHSDENYRYCISTIDEACFVNEAEMRGFHEACSEHHLLRGEGVAGKALTTNQPCFLPDIGSSTKLEYPLSHHAKIFRLKGAVAIRLRCTRTGIADFVLEFFLPTDCEALEEQKTVLDSLSGTMRSVCQTLRVVTDREMEGEAALEMNELNSFTPPEKDKDELSFGGNSADRRGASWTSLAGTSQQEPELAALRMHGTFSPVGQGPSLSGVQATAEGSKTKRRTKAEKTVSLQVLRQYFAVCPTTLKRICRQHGITRWPSRKIKKVDHSLRKLQQIIDSVHGAETAFQLNTLYKDLTDTSISSDNNLSGSVTVPPTNQSNLTDFNKHQPHKSSSNMPSTSHSHSSCSHGSQSSPSCSVGATEHAQQGIIDLMKSENPVKDSSIQTMQTENTSLYEHFSVHEAPIDLLQDVTEKANGAHHSSRSLSSPNPKQNTDANMRVKATFGSEKVRFRLNPECNFQGLKHELAKRLSIVDTNPLVLKYLDDDSEWVLMTCDADLQECLHVYKLADIQTIKISVHLAVSPATRVTAGHTGLS

SEQ ID NO: 223 - protein, 559 aa, Zea mays
MEEGGDPQLPSISVARTTSEGAGAVDLDLLEQLLSGDNGWLEVVSRSPNSVAFPPPSAFFSADATATTVTTTAAPAANASWLIQTGGASTPSVRERFSQALSYIRDTQSDGDVLVQLWVPVNRDDGKLVLTTSGQPFTLDHRSDSLIRFREVSTKYQFPADVRSGESPGLPGRVFIGRLPEWSPDIRCFTSYEYARVTDAKYLDVHGTMGLPVFEKRSYSCLGVIELIMTKQKLNFTSELNTICSALQAVNLRSTEVSSIPRKKFSTASYKDALPEILEVLRAACLTHKLPLAQTWVTCTQQGKRGSRHSDENYRYCISTIDEACFVNEAEMRGFHEACSEHHLLRGEGVAGKALTTNQPCFLPDIGSSTKLEYPLSHHAKIFRLKGAVAIRLRCTRTGIADFVLEFFLPTDCEALEEQKTVLDSLSGTMRSVCQTLRVVTDREMEGEAALEMNELNSFTPPEKDKDELSFGGNSADRRGASWTSLAGTSQQEPELAALRMHGTFSPVGQGPSLSGVQATAEGSKTKRRTKAEKTVSLQVLRQYFAGSLKDAARSLGGE

SEQ ID NO: 224 - protein, 600 aa, Zea mays
MTSWQLLLIIHQFSTASYKDALPEILEVLRAACLTHKLPLAQTWVTCAQQGKRGSRHSDENYRYCISTIDEACFVNEAEMRGFHEACSEHHLLRGEGVAGKAFTTNQPCFLPDIGSSTKLEYSLSHHAKIFKLKGAVAIRLRCTRTGTADFVLEFFLPTDCEALEEQKSVLDSLSGTMRSVCQTLRVVTDREMEDETVLEMNELNSFTPHGKDKVELSFGCNSADRRGEASWTSLAGTSQQESELAALRMHGMFSPGGQGPSLSGVQATAEGSKAKRRTKAEKTVSLQILRQYFAGSLKDAARSLGVCPTTLKRICRQHGITRWPSRKIKKVDHSLRKLQQIIDSVHGAETAFQLNTLYKDITNTSISSDNNLSGSVTVPPTNQSNLTDVNKHQPHKSSSNVPSTSHSHSSCSHSSESSPSCSGGATKHAQQGIIDQMKSENPVKDSSIQTLQTENTSLFEHFSVNETPIDLLQDVTEKANGGHHSSRSPSSPNPKQNTDANMRVKATFGSEKVRFRLNPECNFQELKHEIAKRLSIVDTNPLVLKYLDDDSEWVLMTCDADLQECLHVYKLAGIQTIKISVHLAVSPATRVTTGHTGLS

SEQ ID NO: 225 - protein, 644 aa, Zea mays
MGLPVFEKGSYNCLGVIELIMTRQKINFTSELNTICSALQAVNLRSTEVSSIPRIKFSTASYKDALPEILEVLRAACLTHKLPLAQTWVTCAQQGKRGSRHSDENYRYCISTIDEACFVNEAEMRGFHEACSEHHLLRGEGVAGKAFTTNQPCFLPDIGSSTKLEYSLSHHAKIFKLKGAVAIRLRCTRTGTADFVLEFFLPTDCEALEEQKSVLDSLSGTMRSVCQTLRVVTDREMEDETVLEMNELNSFTPHGKDKVELSFGCNSADRRGEASWTSLAGTSQQESELAALRMHGMFSPGGQGPSLSGVQATAEGSKAKRRTKAEKTVSLQILRQYFAGSLKDAARSLGVCPTTLKRICRQHGITRWPSRKIKKVDHSLRKLQQIIDSVHGAETAFQLNTLYKDITNTSISSDNNLSGSVTVPPTNQSNLTDVNKHQPHKSSSNVPSTSHSHSSCSHSSESSPSCSGGATKHAQQGIIDQMKSENPVKDSSIQTLQTENTSLFEHFSVNETPIDLLQDVTEKANGGHHSSRSPSSPNPKQNTDANMRVKATFGSEKVRFRLNPECNFQELKHEIAKRLSIVDTNPLVLKYLDDDSEWVLMTCDADLQECLHVYKLAGIQTIKISVHLAVSPATRVTTGHTGLS

SEQ ID NO: 226 - protein, 559 aa, Zea mays
MEEGGDPQLPSISAPRTTSEGAGGVDLDLLEQLLSGDNGWLEVVSRSPNSVAFPPLSAFFSADATATTVTTAAPAANASWWIQTGGASPSSVEERFSQALSYIRDTQSDGDVLVQLWVPVNRDDGKLVLTTSEQPFTLDHRSDSLLRFREVSTKYQFSADVKSGDSPGLPGRVFIGRLPEWSPDIRYFTSYEYPRVRDAQYLDVHGTMGLPVFEKGSYNCLGVIELIMTRQKINFTSELNTICSALQAVNLRSTEVSSIPRIKFSTASYKDALPEILEVLRAACLTHKLPLAQTWVTCAQQGKRGSRHSDENYRYCISTIDEACFVNEAEMRGFHEACSEHHLLRGEGVAGKAFTTNQPCFLPDIGSSTKLEYSLSHHAKIFKLKGAVAIRLRCTRTGTADFVLEFFLPTDCEALEEQKSVLDSLSGTMRSVCQTLRVVTDREMEDETVLEMNELNSFTPHGKDKVELSFGCNSADRRGEASWTSLAGTSQQESELAALRMHGMFSPGGQGPSLSGVQATAEGSKAKRRTKAEKTVSLQILRQYFAGSLKDAARSLGGE

SEQ ID NO: 227 - protein, 686 aa, Zea mays
MEEGGDPQLPSISAPRTTSEGAGGVDLDLLEQLLSGDNGWLEVVSRSPNSVAFPPLSAFFSADATATTVTTAAPAANASWWIQTGGASPSSVEERFSQALSYIRDTQSDGDVLVQLWVPVNRDDGKLVLTTSEQPFTLDHRSDSLLRFREVSTKYQFSADVKSGDSPGLPGRVFIGRLPEWSPDIRYFTSYEYPRVRDAQYLDVHGTMGLPVFEKGSYNCLGVIELIMTRQKINFTSELNTICSALQAVNLRSTEVSSIPRIKFSTASYKDALPEILEVLRAACLTHKLPLAQTWVTCAQQGKRGSRHSDENYRYCISTIDEACFVNEAEMRGFHEACSEHHLLRGEGVAGKAFTTNQPCFLPDIGSSTKLEYSLSHHAKIFKLKGAVAIRLRCTRTGTADFVLEFFLPTDCEALEEQKSVLDSLSGTMRSVCQTLRVVTDREMEDETVLEMNELNSFTPHGKDKVELSFGCNSADRRGEASWTSLAGTSQQESELAALRMHGMFSPGGQGPSLSGVQATAEGSKAKRRTKAEKTVSLQILRQYFAGSLKDAARSLGVCPTTLKRICRQHGITRWPSRKIKKVDHSLRKLQQIIDSVHGAETAFQLNTLYKDITNTSISSDNNLSGSVTVPPTNQSNLTDVNKHQPHKSSSNVPSTSHSHSSCSHSSESSPSCSGGATKHAQQGCY

SEQ ID NO: 228 - protein, 841 aa, Zea mays
MEEGGDPQLPSISVARTTSEGAGAVDLDLLEQLLSGDNGWLEVVSRSPNSVAFPPPSAFFSADATATTVTTTAAPAANASWLIQTGGASTPSVRERFSQALSYIRDTQSDGDVLVQLWVPVNRDDGKLVLTTSGQPFTLDHRSDSLIRFREVSTKYQFPADVRSGESPGLPGRVFIGRLPEWSPDIRCFTSYEYARVTDAKYLDVHGTMGLPVFEKRSYSCLGVIELIMTKQKLNFTSELNTICSALQVGDLNLTAPESSEKYTANALGSLQAVNLRSTEVSSIPRKKFSTASYKDALPEILEVLRAACLTHKLPLAQTWVTCTQQGKRGSRHSDENYRYCISTIDEACFVNEAEMRGFHEACSEHHLLRGEGVAGKALTTNQPCFLPDIGSSTKLEYPLSHHAKIFRLKGAVAIRLRCTRTGIADFVLEFFLPTDCEALEEQKTVLDSLSGTMRSVCQTLRVVTDREMEGEAALEMNELNSFTPPEKDKDELSFGGNSADRRGASWTSLAGTSQQEPELAALRMHGTFSPGGQGPSLSGVQATAEGMCPTTLKRICRQHGITRWPSRKIKKVDHSLRKLQQIIDSVHGAETAFQLNTLYKDLTDTSISSDNNLSGSVTVPPTNQSNLTDFNKHQPHKSSSNMPSTSHSHSSCSHGSQSSPSCSVGATEHAQQGIIDLMKSENPVKDSSIQTMQTENTSLYEHFSVHEAPIDLLQDVTEKANGAHHSSRSMSSPNRKQNTDANMRVKATFGSEKVRFRLNPECNFQGLKHELAKRLSIVDTNPLVLKYLDDDSEWVLMTCDADLQECLHVYKLADIQTIKISVHLAVSPATRVTAGHTGLS

SEQ ID NO: 229 - protein, 869 aa, Zea mays
MCMDQQNRSSEGRVTCICMEEGGDPQLPSISAPRTTSEGAGGVDLDLLEQLLSGDNGWLEVVSRSPNSVAFPPLSAFFSADATATTVTTAAPAANASWWIQTGGASPSSVEERFSQALSYIRDTQSDGDVLVQLWVPVNRDDGKLVLTTSEQPFTLDHRSDSLLRFREVSTKYQFSADVKSGDSPGLPGRVFIGRLPEWSPDIRYFTSYEYPRVRDAQYLDVHGTMGLPVFEKGSYNCLGVIELIMTRQKINFTSELNTICSALQAVNLRSTEVSSIPRIKFSTASYKDALPEILEVLRAACLTHKLPLAQTWVTCAQQGKRGSRHSDENYRYCISTIDEACFVNEAEMRGFHEACSEHHLLRGEGVAGKAFTTNQPCFLPDIGSSTKLEYSLSHHAKIFKLKGAVAIRLRCTRTGTADFVLEFFLPTDCEALEEQKSVLDSLSGTMRSVCQTLRVVTDREMEDETVLEMNELNSFTPHGKDKVELSFGCNSADRRGEASWTSLAGTSQQESELAALRMHGMFSPGGQGPSLSGVQATAEGSKAKRRTKAEKTVSLQILRQYFAGSLKDAARSLGVCPTTLKRICRQHGITRWPSRKIKKVDHSLRKLQQIIDSVHGAETAFQLNTLYKDITNTSISSDNNLSGSVTVPPTNQSNLTDVNKHQPHKSSSNVPSTSHSHSSCSHSSESSPSCSGGATKHAQQGIIDQMKSENPVKDSSIQTLQTENTSLFEHFSVNETPIDLLQDVTEKANGGHHSSRSPSSPNPKQNTDANMRVKATFGSEKVRFRLNPECNFQELKHEIAKRLSIVDTNPLVLKYLDDDSEWVLMTCDADLQECLHVYKLAGIQTIKISVHLAVSPATRVTTGHTGLS

SEQ ID NO: 230 - protein, 851 aa, Zea mays
MEEGGDPQLPSISVARTTSEGAGAVDLDLLEQLLSGDNGWLEVVSRSPNSVAFPPPSAFFSADATATTVTTTAAPAANASWLIQTGGASTPSVRERFSQALSYIRDTQSDGDVLVQLWVPVNRDDGKLVLTTSGQPFTLDHRSDSLIRFREVSTKYQFPADVRSGESPGLPGRVFIGRLPEWSPDIRCFTSYEYARVTDAKYLDVHGTMGLPVFEKRSYSCLGVIELIMTKQKLNFTSELNTICSALQAVNLRSTEVSSIPRKKFSTASYKDALPEILEVLRAACLTHKLPLAQTWVTCTQQGKRGSRHSDENYRYCISTIDEACFVNEAEMRGFHEACSEHHLLRGEGVAGKALTTNQPCFLPDIGSSTKLEYPLSHHAKIFRLKGAVAIRLRCTRTGIADFVLEFFLPTDCEALEEQKTVLDSLSGTMRSVCQTLRVVTDREMEGEAALEMNELNSFTPPEKDKDELSFGGNSADRRGASWTSLAGTSQQEPELAALRMHGTFSPVGQGPSLSGVQATAEGSKTKRRTKAEKTVSLQVLRQYFAGSLKDAARSLGVCPTTLKRICRQHGITRWPSRKIKKVDHSLRKLQQIIDSVHGAETAFQLNTLYKDLTDTSISSDNNLSGSVTVPPTNQSNLTDFNKHQPHKSSSNMPSTSHSHSSCSHGSQSSPSCSVGATEHAQQGIIDLMKSENPVKDSSIQTMQTENTSLYEHFSVHEAPIDLLQDVTEKANGAHHSSRSLSSPNPKQNTDANMRVKATFGSEKVRFRLNPECNFQGLKHELAKRLSIVDTNPLVLKYLDDDSEWVLMTCDADLQECLHVYKLADIQTIKISVHLAVSPATRVTAGHTGLS

SEQ ID NO: 231 - protein, 984 aa, Zea mays
MQAQKEGALRGEDACDCTTQVRFHHQRLPCLSLAPHVAVSEIDQTEPPGQEQAAHLHSIHCFIGGRTASATRERPRSSSCHCASEAPQTHGGGGLLACGVMEDVAVGDLDLMEELFMAAPGFDFSDFSQPGAGGESPGVCFSPLFDICSTTTTATPPPPPPSGDDNRDQPTPPRRGWVFQPRLEVDATVKERLRRALERIASLSQTQPGELLAQVWVPTVIGDRQVLTTCGQPFWLDCRNERLANYRTVSMKYQFSADETARTDLGMPGRVFVGRVPEWTPDVRYFSTEEYPRVHHAQYFDIRGSVALPIFEPRSRVCLGVVELVMTTEKVNYNAEIQNICSALKEVDLRSSDVSSDSRAKVTDTSYRAIIPEIVDVLRTVCETHKLPLAQTWIPCICQAKRGSRHTDEKLKYCVSTLDEACYVRDLNVNGFHEACSEHHLFRGEGVVGRAFATNEPCFSEDITASSKIQYPLSHHAKLFSLRAAVAIRLRSISTGSLDYVLEFFLPVDCIEIEEQRAMLNSLSITIQQTCYTLRVVSLKELVDEGSIETSALTPPEYDKSMHENIDEVCSGIGVPARTASLETSEEVSSWIASLVCAQNKGVKEMDGDLPFGFSKQEDEGFSVTAGWHTSPVIEPEGSIFSGFKQHEEYKVKEVTCLRDPSSSNLEKTVEKRRTKMEKTVSLEELRKHFAGSLKEAAKNLGVCPTTLKRICRQHGINRWPSRKIKKVGHSLKKLQMVIDSVHGSEGTVQLSSLYENFTKTTWSERELQGDATYPLSEEKGPLEPSVPDRYCEGRFTSHTSGSNSLSPSCSQSSNSSHGCSSGSKSQQHVSAPQLAVKKEVFMEENQSSTLLKAASHAELQMLPEERLVTLPRSHSQVLLSEQKPVENITGMQMSKPDSLKIKAMYGEERCIFRLQPSWGFEKLKEEILKRFGIAREVYVDLKYLDDESEWVLLTCNADLLECIDVYKSSSTQTVRILVHSSDQ

SEQ ID NO: 232 - protein, 851 aa, Zea mays
MEEGGDPQLPSISVARTTSEGAGAVDLDLLEQLLSGDNGWLEVVSRSPNSVAFPPPSAFFSADATATTVTTTAAPAANASWLIQTGGASTPSVRERFSQALSYIRDTQSDGDVLVQLWVPVNRDDGKLVLTTSGQPFTLDHRSDSLIRFREVSTKYQFPADVRSGESPGLPGRVFIGRLPEWSPDIRCFTSYEYARVTDAKYLDVHGTMGLPVFEKRSYSCLGVIELIMTKQKLNFTSELNTICSALQAVNLRSTEVSSIPRKKFSTASYKDALPEILEVLRAACLNHKLPLAQTWVTCTQQGKRGSRHSDENYRYCISTIDEACFVNEAKMRGFHEACSEHHLLRGEGVAGKALTTNQPCFLPDIGSSTKLEYPLSHHAKIFKLKGAVAIRLRCTRTGIADFVLEFFLPTDCEALEEQKTVLDSLSGTMQSVCQTLRVVTEREMEDEAALEMNELNSFTPPGKDKDELSFGGNSADRREASWTSLAGTSQQEPDLAALRMHGTFSPGGQGPSLSGVQATAEGSKTKRRTKAEKTVSLQVLRQYFAGSLKDAARSLGVCPTTLKRICRQHGITRWPSRKIKKVDHSLRKLQQIIDSVHGAETAFQLNTLYKDLTDTSISSDNNLSGSVTVPPTNQSNLTDFNKHQPHKSSSNMPSTSHSHSSCSHGSQSSPSCSVGATEHAQQGIIDPMKSENPVKDSSIQTMQTENTSLYEHFSVHEAPIDLLQDVTEKANDAHHSSRSLSSPNPKQNTDANMRVKATFGSEKVRFRLNPECNFQGLKHELAKRLRIVDTNPLVLKYLDDDSEWVLMTCDADLQECLHVYKLADIQTIKISVHLAVSPATRVTAGHTGLS

SEQ ID NO: 233 - protein, 534 aa, Zea mays
MLHGGGSDRESYLHLHGRGRRPAASEHLRTHHVQRRGGVDLDLLEQLLSGDNGWLEVVSRSPNLVAFPLLSAFFSADATATTVTTAATAAPAANASWWIQTGGTSPSSVEERFSQAMSYIRDTEQPFTLDHRSDSLLRFREVSTKYQFSADVKSGDSPGLPGRVFIGRLPEWSPDIRYFTSYEYPRVRDAQYLDVHGTMGLPVFEKGSYNCLGVIELIMTRQKINFTSKLNTICSALQAVNLRSTEVSSIPRIKNYRYCISTIDEACFVNEAEMRGFHEACSEHHLLRGEGVAGKAFTTNQPCFLPDIGSSTKLEYPLSHHAKIFKLKGAVAILLRCTRTGTADFVLEFFLPTDCEALEEQKIVLDSLSGTMRSVCQTLRVVTDREMEDEAVLEMNELNSFTPHGKDQVELSFGDNSADRRGEASWTSLAGTSQQESELAALRMHGMFSPGGQGPSLSGVTAEGSKAKRRTKAEKTYFAGSLKDAARSLGGSKQEGCSCIVSLDTSYQLQARLEQQIDGKAHYLSTLAGMALKS

SEQ ID NO: 234 - protein, 854 aa, Zea mays
MEEGGDPQLPSISAPRTTSEGAGGVDLDLLEQLLSGDNGWLEVVSRSPNSVAFPPLSAFFSADATATTVTTAATAAPAANASWWIQTGGASPSSVEERFSQALSYIRDTQSDGDVLVQLWVPVNRDDGKLVLTTSEQPFTLDHRSDSLLRFREVSTKYQFSADVKSGDSPGLPGRVFIGRLPEWSPDIRYFTSYEYPRVRDAQYLDVHGTMGLPVFEKGSYNCLGVIELIMTRQKINFTSELNTICSALQAVNLRSTEVSSIPRIKFSTASYKDALPEILEVLRAACLTHKLPLAQTWVTCAQQGKRGSRHSDENYRYCISTIDEACFVNEAEMRGFHEACSEHHLLRGEGVAGKAFTTNQPCFLPDIGSSTKLEYPLSHHAKIFKLKGAVAIRLRCTRTGTADFVLEFFLPTDCEALEEQKSVLDSLSGTMRSVCQTLRVVTDREMEDETVLEMNELNSFTPHGKDKVELSFGCNSADRRGEASWTSLAGTSQQESELAALRMHGMFSPGGQGPSLSGVQATAEGSKAKRRTKAEKTVSLHILRQYFAGSLKDAARSLGVCPTTLKRICRQHGITRWPSRKIKKVDHSLRKLQQIIDSVHGAETAFQLNTLYKDITNTSISSDNNLSGSVTVPPTNQSNLTDVNKHQPHKSSSNVPSTSHSHSSCSHSSESSPSCSGGATKHAQQGIIDQMKSENPVKDSSIQTLQTENTSLFEHFSVNETPIDLLQDVTEKANGGHHSSRSPSSPNPKQNTDANMRVKATFGSEKVRFRLNPECNFQELKHEIAKRLSIVDTNPLVLKYLDDDSEWVLMTCDADLQECLHVYKLAGIQTIKISVHLAVSPATRVTTGHTGLS

SEQ ID NO: 235 - protein, 906 aa, Ziziphus jujuba
MDDSVLSPALVLGAPSDTAMDLDFMDELFLEGCWLETTDGSGFLNQSPPGSNALFDPLFVWPSSETNSELGTNPSKRSNQDERHKASFNEPVERGPLATESSPQTMIDVAGCSDGLEDQTFQVCEPGRRWWIGPKASPGPASSVVERLVGALALIKDVIKDKNSLVQIWVPVHREGRHVLTTNNLPCAVYPSCHKLARYRDISVNYEFSAEEDSEELVMGLPGRVFSRKVPEWTPDVRFFRNEEYPRVSHAQQNDVCGTLALPIFEKGSRNCLGVVEVVLTTQKIKYRSELESVCEALEAVDLRSSEILNRNVKVRNMYCQASLPEIQEVLRSACETHRLPLAQTWVPCIQQAKDGSRHSDDNYTWCVSTVDHACHVADLHFRAFHEACSEHHLLKGQGIVGEAFMTNKPCFSDDIASISKTKYPLSHHARMFGLRSAVAIRLRSIHADVADFVLELFLPVDCTDPEEQKKMLTSLSLIIQQFCRSLRVITDEELEEESEFPVSEVTVPSNSRPGTTASLTEVRQGGTAISLFPKEKPMEDSGEKLSKLGQLQKDSNNKTVEYAGDCYTIGEGSCSSLGVGKTSEKRRTKAEKTITLQVLRQYFAGSLKDAAKSIGVCSTTLKRICRQHGIKRWPSRKIKKVGHSLQKLQLVIDSVQGASGAFQIDSFYTNFPELASPNLSGSDPFSTSKRDHPKPTNMQPEGGMFSSQATASKSSSSCSQSSSSSQSCSSRSQQQPRMSNVAGNEDLMVGENFGDGMLKRVRSEAELHASTVDVSKPLQRSRSHKSLSDHHQKENVPTLPRDNSRGSQVVGDFQRVKVTYGDEKTRFRMHNSWGVKELVQEISRRFDIEDMDQFDIKYLDDDSEWVLLTCDADLEECIEIYRSSSESNTIKLSLHVSRHHLRGPS

SEQ ID NO: 236 - skipped

SEQ ID NO: 237 - protein, 894 aa, Arabidopsis thaliana
MENPSASRDNKGFCFPDIPVEEMDGWVKNLISEEDMFSSSSTSELMNFESFASWCNSPSAADILFTQYGLSTSQSIIPFGGLEGSYACEKRPLDCTSVPRSLSHSLDEKMLKALSLFMEFSGEGILAQFWTPIKTGDQYMLSTCDQAYLLDSRLSGYREASRRFTFSAEANQCSYPGLPGRVFISGVPEWTSNVMYYKTAEYLRMKHALDNEVRGSIAIPVLEASGSSCCAVLELVTCREKPNFDVEMNSVCRALQAVNLQTSTIPRRQYLSSNQKEALAEIRDVLRAVCYAHRLPLALAWIPCSYSKGANDELVKVYGKNSKECSLLCIEETSCYVNDMEMEGFVNACLEHYLREGQGIVGKALISNKPSFSSDVKTFDICEYPLVQHARKFGLNAAVATKLRSTFTGDNDYILEFFLPVSMKGSSEQQLLLDSLSGTMQRLCRTLKTVSDAESIDGTEFGSRSVEMTNLPQATVSVGSFHTTFLDTDVNSTRSTFSNISSNKRNEMAGSQGTLQQEISGARRLEKKKSSTEKNVSLNVLQQYFSGSLKDAAKSLGVCPTTLKRICRQHGIMRWPSRKINKVNRSLRKIQTVLDSVQGVEGGLKFDSVTGEFVAVGPFIQEFGTQKSLSSHDEDALARSQGDMDEDVSVEPLEVKSHDGGGVKLEEDVETNHQAGPGSLKKPWTWISKQSGLIYSDDTDIGKRSEEVNKDKEDLCVRRCLSSVALAGDGMNTRIERGNGTVEPNHSISSSMSDSSNSSGAVLLGSSSASLEQNWNQIRTHNNSGESGSSSTLTVKATYREDTVRFKLDPYVVGCSQLYREVAKRFKLQEGAFQLKYLDDEEEWVMLVTDSDLHECFEILNGMRKHTVKFLVRDIPNTAMGSSAGSNGYLGTGT

SEQ ID NO: 238 - protein, 947 aa, Arabidopsis thaliana
MENPFASREKGFGNYSDFPTEQMDGLSSNFGSGVRNLISDDMFNPSSELMNFDSLAAWCNSPSATDILFAQYGLSNSQPMPFGAFTSFHVADPKATSLTRSFYDLESSYYGEERSSAQEMNSQFHRSSDSDELSGKRRKVVNQKIGFPNVLNCTIPRSLSHSLDEKMLKALSLFMESSGSGEGILAQVWTPIKTGDQYLLSTCDQAYLLDPRFSQYREVSRRFTFAAEANQCSFPGLPGRVFISGVPEWTSNVMYYKTDEYLRMKHAIDNEVRGSIAIPILEASGTSCCAVMELVTSKEKPNFDMEMDSVCRALQAVNLRTAAIPRPQYLSSSQRDALAEIQDVLRTVCHAHKLPLALAWIPCRKDQSIRVSGQKSGENCILCIEETACYVNDMEMEGFVHACLEHCLREKEGIVGKAFISNQPFFSSDVKAYDISEYPIVQHARKYGLNAAVAIKLRSTYTGEDDYILELFLPVSMKGSLEQQLLLDSLSGTMQRICRTLRTVSEVGSTKKEGTKPGFRSSDMSNFPQTTSSENFQTISLDSEFNSTRSMFSGMSSDKENSITVSQGTLEQDVSKARTPEKKKSTTEKNVSLSALQQHFSGSLKDAAKSLGGETSAYFQAWVYFFCPTTLKRICRQHGIMRWPSRKINKVNRSLRKIQTVLDSVQGVEGGLKFDSATGEFIAVRPFIQEIDTQKGLSSLDNDAHARRSQEDMPDDTSFKLQEAKSVDNAIKLEEDTTMNQARPGSFMEVNASGQPWAWMAKESGLNGSEGIKSVCNLSSVEISDGMDPTIRCSGSIVEPNQSMSCSISDSSNGSGAVLRGSSSTSMEDWNQMRTHNSNSSESGSTTLIVKASYREDTVRFKFEPSVGCPQLYKEVGKRFKLQDGSFQLKYLDDEEEWVMLVTDSDLQECLEILHGMGKHSVKFLVRDLSAPLGSSGGSNGYLGTGL

SEQ ID NO: 239 - protein, 870 aa, Arachis duranensis
MEPYPYSPKRSGASYWGSCRVQLEGSTSLDGDMSNSISDDMACSFSGLMNFDPYAGLYNSPSITDQVFNNGLPSSYPSTPGFNLEENNSSQFFRTEMNGYFNTKQGSPGYGEKIAFQQMDTLLGFFDGTDDTHSLSSMQKINGSSQHLDAIGSYIMSKPASLSLDERMLKALSVFKESAGGGILAQVWVPIKDGDQFFLTTSEQPYLLDQILAGYREVSRTYTFSTEGKPGSLPGLPGRVFMSKTPEWTSNIGYYNKNEYLRMDDAINHEVRGSIGLPISDLHSELPCCAVLELVTTNEKPDFEKEMDIVCHALQNVDLTANMPPRLLPQCLSNSKRAALTAIVDVLRSVCHAHRLPIALTWIPCCVAEDAEGKDTKIHIKEGHSSPREKNILCVEESACYVTDKAMEGFVHACIEHHLQEGKGIAGRAHQSNHPFFCPDVKAYNISEYPLVHHARKYNLNAAVAIRLRSTYTNDDDYILEFFLPVNMKGSSEQQLLLDNLSGTMQKVCRNLRTVSDEELSRMKGSHVGFKNKNVPRIFPMSRRNSQIPLTNSNHDSVRKMSIKASNQGNNGIESSHNQERNGSRRMVETKRPAEKKVSLSVLQQHFSGTLKDAARSIGVCPTTLKRICRKQGISRWPSRKIKKVNRSLKKIQTVLDTVEGLEGGLKFDPCLGALVSREGESIIQEIDAHDTLLHPENVTAKEKWVLNKGGSREDKSKHSSILVNRDDDGAVEHNHPSSSGFTNSSNDSGSNQRQNLKGKSTFADKTGLKLQAKATYGEDTVRFKFDPSWGCLKLYEEVATRFKLQNGSFQLKYLDNEQELVRLLDDSDLQECMEILDEVGKSCVRFVVRDIPCNLSSPSCSSCYLGCDS

SEQ ID NO: 240 - skipped

SEQ ID NO: 241 - protein, 891 aa, Arachis duranensis
MEDQFFSEGEGIGYWTPPGAQFDGPSMIDNGIKNLVSEEMLDNLPDLMNFDNLAGWGNIPSVTDHNLDNEISSLASMQYSPPDAFSLVEQDNDPYFMTKDCGNYNATETSLGFDEKAVLQQLETQLGLSEDANDMNNINGSLRELSAADMGNCLVPRPFAWSLDERMLRAMDLFKESVGDGILTQVWAPMKHGNDFILSTSEQPYLLDHMLAGYRDVSRQFTFSAEDKPGSFPGLPGRVFNSQIPEWTSNVGYYNKSEYLRVEHAINHEVRGSIAVPIIDTLAEPPCCAILELVTTKEKTDFDRELEIVSSALQLVNLRTTTPPRLMSQCLSNNKRAALAEIIDVLRAVCHAHRLPLALTWIPCYYSEGIGDEASRIRIKDGGRIPGEKTVLCIEESACYINDIVVGGFVHACVEHYLEEGQGAAGKALQSNRPFFCPDVKAYNISEYPLVHHARKYKLNAAVAVRLRSIHTNDDDYIIEFFLPVNMNGSEEQQLLLDNLSDTVQRMCQSLRIVSDAELHGIEGSQVQFSKEEGSHMAPDGDHDNHDSVQPMSMTNNETEAAHNQAMEGSRKQIEKKRSPVKKNVSLSVLQQYFSCSLKDAAKSLGVCPTTLKRICRQHGIARWPSRKINKVNRSLKKIRTVLDSVQGVEGGLKFDPYKGGFMSVGSSNQEINAHKSSLFRKKCSVKYPDPASGSKDSKPIAMGDGGLRQEPFPVSILESFWCDIAYHSPNSLVADEMETYLNGADKLGEHYNPTTSSMTDSSNGSCSILRSSSSASGKFENRKHLKAKSPCVDSGSKIIVKAAYGEDLIRFKFDPAAGCLQLYEEVAARFKLQIGSFQLKYLDDEEEWVRMANDSDLEDCIEMLDDLDTRAVKLLVHDMPSGLSSLGSNG

SEQ ID NO: 242 - protein, 890 aa, Arachis duranensis
MEDQFFSEGEGIGYWTPPGAQFDGPSMIDNGIKNLVSEEMLDNLPDLMNFDNLAGWGNIPSVTDHNLDNEISSLASMQYSPPDAFSLVEQDNDPYFMTKDCGNYNATETSLGFDEKAVLQQLETQLGLSEDANDMNNINGSLRELSAADMGNCLVPRPFAWSLDERMLRAMDLFKESVGDGILTQVWAPMKHGNDFILSTSEQPYLLDHMLAGYRDVSRQFTFSAEDKPGSFPGLPGRVFNSQIPEWTSNVGYYNKSEYLRVEHAINHEVRGSIAVPIIDTLAEPPCCAILELVTTKEKTDFDRELEIVSSALQLVNLRTTTPPRLMSQCLSNNKRAALAEIIDVLRAVCHAHRLPLALTWIPCYYSEGIGDEASRIRIKDGGRIPGEKTVLCIEESACYINDIVVGGFVHACVEHYLEEGQGAAGKALQSNRPFFCPDVKAYNISEYPLVHHARKYKLNAAVAVRLRSIHTNDDDYIIEFFLPVNMNGSEEQQLLLDNLSDTVQRMCQSLRIVSDAELHGIEGSQVQFSKEEGSHMAPDGDHDNHDSVQPMSMTNNETEAAHNQAMEGSRKQIEKKRSPVKKNVSLSVLQQYFSCSLKDAAKSLVCPTTLKRICRQHGIARWPSRKINKVNRSLKKIRTVLDSVQGVEGGLKFDPYKGGFMSVGSSNQEINAHKSSLFRKKCSVKYPDPASGSKDSKPIAMGDGGLRQEPFPVSILESFWCDIAYHSPNSLVADEMETYLNGADKLGEHYNPTTSSMTDSSNGSCSILRSSSSASGKFENRKHLKAKSPCVDSGSKIIVKAAYGEDLIRFKFDPAAGCLQLYEEVAARFKLQIGSFQLKYLDDEEEWVRMANDSDLEDCIEMLDDLDTRAVKLLVHDMPSGLSSLGSNG

SEQ ID NO: 243 - protein, 888 aa, Arachis duranensis
MEDQFFSEGEGIGYWTPPGAQFDGPSMIDNGIKNLVSEEMLDNLPDLMNFDNLAGWGNIPSVTDHNLDNEISSLASMQYSPPDAFSLVEQDNDPYFMTKDCGNYNATETSLGFDEKAVLQQLETQLGLSEDANDMNNINGSLRELSAADMGNCLVPRPFAWSLDERMLRAMDLFKESVGDGILTQVWAPMKHGNDFILSTSEQPYLLDHMLAGYRDVSRQFTFSAEDKPGSFPGLPGRVFNSQIPEWTSNVGYYNKSEYLRVEHAINHEVRGSIAVPIIDTLAEPPCCAILELVTTKEKTDFDRELEIVSSALQLVNLRTTTPPRLMSQCLSNNKRAALTEIIDVLRAVCRAHSLPLALTWIPCYYSEGIGDEASRIRTKEGRKLPGEKTVLCIEESACYMNDIVVGGFVRACVEHYLEEGQGAAGKALQSNRPFFCPDVKAYNISEYPLVHHARKYKLNAAVAIRLRSTHTNDDDYIIEFFLPLNMNRCQEQQVLLENLSRTMQRMCQTLRKVSDAELYGIEGSQVQFSKEEGSHMAPDGNHDSVQPMSMTNNETEAAHNQAMEGSRKQIEKKRSPVKKNVSLSVLQQYFSCSLKDAAKSLGVCPTTLKRICRQHGIARWPSRKINKVNRSLKKIRTVLDSVQGVEGGLKFDPYKGGFMSVGSSNQEINAHKSSLFRKKCSVKYPDPASGSKDSKPIAMGDGGLRQEPFPVSILESFWCDIAYHSPNSLVADEMETYLNGADKLGEHYNPTTSSMTDSSNGSCSILRSSSSASGKFENRKHLKAKSPCVDSGSKIIVKAAYGEDLIRFKFDPAAGCLQLYEEVAARFKLQIGSFQLKYLDDEEEWVRMANDSDLEDCIEMLDDLDTRAVKLLVHDMPSGLSSLGSNG

SEQ ID NO: 244 - protein, 888 aa, Arachis duranensis
MEDQFFSEGEGIGYWTPPGAQFDGPSMIDNGIKNLVSEEMLDNLPDLMNFDNLAGWGNIPSVTDHNLDNEISSLASMQYSPPDAFSLVEQDNDPYFMTKDCGNYNATETSLGFDEKAVLQQLETQLGLSEDANDMNNINGSLRELSAADMGNCLVPRPFAWSLDERMLRAMDLFKESVGDGILTQVWAPMKHGNDFILSTSEQPYLLDHMLAGYRDVSRQFTFSAEDKPGSFPGLPGRVFNSQIPEWTSNVGYYNKSEYLRVEHAINHEVRGSIAVPIIDTLAEPPCCAILELVTTKEKTDFDRELEIVSSALQLVNLRTTTPPRLMSQCLSNNKRAALAEIIDVLRAVCHAHRLPLALTWIPCYYSEGIGDEASRIRIKDGGRIPGEKTVLCIEESACYINDIVVGGFVHACVEHYLEEGQGAAGKALQSNRPFFCPDVKAYNISEYPLVHHARKYKLNAAVAVRLRSIHTNDDDYIIEFFLPVNMNGSEEQQLLLDNLSDTVQRMCQSLRIVSDAELHGIEGSQVQFSKEEGSHMAPDGDHDLVQPMSMTNNETEAAHNQAMEGSRKQIEKKRSPVKKNVSLSVLQQYFSCSLKDAAKSLGVCPTTLKRICRQHGIARWPSRKINKVNRSLKKIRTVLDSVQGVEGGLKFDPYKGGFMSVGSSNQEINAHKSSLFRKKCSVKYPDPASGSKDSKPIAMGDGGLRQEPFPVSILESFWCDIAYHSPNSLVADEMETYLNGADKLGEHYNPTTSSMTDSSNGSCSILRSSSSASGKFENRKHLKAKSPCVDSGSKIIVKAAYGEDLIRFKFDPAAGCLQLYEEVAARFKLQIGSFQLKYLDDEEEWVRMANDSDLEDCIEMLDDLDTRAVKLLVHDMPSGLSSLGSNG

SEQ ID NO: 245 - protein, 888 aa, Arachis duranensis
MEDQFFSEGEGIGYWTPPGAQFDGPSMIDNGIKNLVSEEMLDNLPDLMNFDNLAGWGNIPSVTDHNLDNEISSLASMQYSPPDAFSLVEQDNDPYFMTKDCGNYNATETSLGFDEKAVLQQLETQLGLSEDANDMNNINGSLRELSAADMGNCLVPRPFAWSLDERMLRAMDLFKESVGDGILTQVWAPMKHGNDFILSTSEQPYLLDHMLAGYRDVSRQFTFSAEDKPGSFPGLPGRVFNSQIPEWTSNVGYYNKSEYLRVEHAINHEVRGSIAVPIIDTLAEPPCCAILELVTTKEKTDFDRELEIVSSALQLVNLRTTTPPRLMSQCLSNNKRAALAEIIDVLRAVCHAHRLPLALTWIPCYYSEGIGDEASRIRIKDGGRIPGEKTVLCIEESACYINDIVVGGFVHACVEHYLEEGQGAAGKALQSNRPFFCPDVKAYNISEYPLVHHARKYKLNAAVAVRLRSIHTNDDDYIIEFFLPVNMNGSEEQQLLLDNLSDTVQRMCQSLRIVSDAELHGIEGSQVQFSKEEGSHMAPDGDHDLVQPMSMTNNETEAAHNQAMDGSRKQTEKKKSSVEKNFSSSVLQQYFSGSLKDAAKSLGVCPTTLKRICRQHGIARWPSRKINKVNRSLKKIRTVLDSVQGVEGGLKFDPYKGGFMSVGSSNQEINAHKSSLFRKKCSVKYPDPASGSKDSKPIAMGDGGLRQEPFPVSILESFWCDIAYHSPNSLVADEMETYLNGADKLGEHYNPTTSSMTDSSNGSCSILRSSSSASGKFENRKHLKAKSPCVDSGSKIIVKAAYGEDLIRFKFDPAAGCLQLYEEVAARFKLQIGSFQLKYLDDEEEWVRMANDSDLEDCIEMLDDLDTRAVKLLVHDMPSGLSSLGSNG

SEQ ID NO: 246 - protein, 860 aa, Arachis duranensis
MEDQFFSEGEGIGYWTPPGAQFDGPSMIDNGIKNLVSEEMLDNLPDLMNFDNLAGWVEQDNDPYFMTKDCGNYNATETSLGFDEKAVLQQLETQLGLSEDANDMNNINGSLRELSAADMGNCLVPRPFAWSLDERMLRAMDLFKESVGDGILTQVWAPMKHGNDFILSTSEQPYLLDHMLAGYRDVSRQFTFSAEDKPGSFPGLPGRVFNSQIPEWTSNVGYYNKSEYLRVEHAINHEVRGSIAVPIIDTLAEPPCCAILELVTTKEKTDFDRELEIVSSALQLVNLRTTTPPRLMSQCLSNNKRAALAEIIDVLRAVCHAHRLPLALTWIPCYYSEGIGDEASRIRIKDGGRIPGEKTVLCIEESACYINDIVVGGFVHACVEHYLEEGQGAAGKALQSNRPFFCPDVKAYNISEYPLVHHARKYKLNAAVAVRLRSIHTNDDDYIIEFFLPVNMNGSEEQQLLLDNLSDTVQRMCQSLRIVSDAELHGIEGSQVQFSKEEGSHMAPDGDHDNHDSVQPMSMTNNETEAAHNQAMEGSRKQIEKKRSPVKKNVSLSVLQQYFSCSLKDAAKSLGVCPTTLKRICRQHGIARWPSRKINKVNRSLKKIRTVLDSVQGVEGGLKFDPYKGGFMSVGSSNQEINAHKSSLFRKKCSVKYPDPASGSKDSKPIAMGDGGLRQEPFPVSILESFWCDIAYHSPNSLVADEMETYLNGADKLGEHYNPTTSSMTDSSNGSCSILRSSSSASGKFENRKHLKAKSPCVDSGSKIIVKAAYGEDLIRFKFDPAAGCLQLYEEVAARFKLQIGSFQLKYLDDEEEWVRMANDSDLEDCIEMLDDLDTRAVKLLVHDMPSGLSSLGSNG

SEQ ID NO: 247 - protein, 795 aa, Arachis duranensis
MTKDCGNYNATETSLGFDEKAVLQQLETQLGLSEDANDMNNINGSLRELSAADMGNCLVPRPFAWSLDERMLRAMDLFKESVGDGILTQVWAPMKHGNDFILSTSEQPYLLDHMLAGYRDVSRQFTFSAEDKPGSFPGLPGRVFNSQIPEWTSNVGYYNKSEYLRVEHAINHEVRGSIAVPIIDTLAEPPCCAILELVTTKEKTDFDRELEIVSSALQLVNLRTTTPPRLMSQCLSNNKRAALAEIIDVLRAVCHAHRLPLALTWIPCYYSEGIGDEASRIRIKDGGRIPGEKTVLCIEESACYINDIVVGGFVHACVEHYLEEGQGAAGKALQSNRPFFCPDVKAYNISEYPLVHHARKYKLNAAVAVRLRSIHTNDDDYIIEFFLPVNMNGSEEQQLLLDNLSDTVQRMCQSLRIVSDAELHGIEGSQVQFSKEEGSHMAPDGDHDNHDSVQPMSMTNNETEAAHNQAMEGSRKQIEKKRSPVKKNVSLSVLQQYFSCSLKDAAKSLGVCPTTLKRICRQHGIARWPSRKINKVNRSLKKIRTVLDSVQGVEGGLKFDPYKGGFMSVGSSNQEINAHKSSLFRKKCSVKYPDPASGSKDSKPIAMGDGGLRQEPFPVSILESFWCDIAYHSPNSLVADEMETYLNGADKLGEHYNPTTSSMTDSSNGSCSILRSSSSASGKFENRKHLKAKSPCVDSGSKIIVKAAYGEDLIRFKFDPAAGCLQLYEEVAARFKLQIGSFQLKYLDDEEEWVRMANDSDLEDCIEMLDDLDTRAVKLLVHDMPSGLSSLGSNG

SEQ ID NO: 248 - protein, 772 aa, Arachis duranensis
MEDQFFSEGEGIGYWTPPGAQFDGPSMIDNGIKNLVSEEMLDNLPDLMNFDNLAGWGNIPSVTDHNLDNEISSLASMQYSPPDAFSLVEQDNDPYFMTKDCGNYNATETSLGFDEKAVLQQLETQLGLSEDANDMNNINGSLRELSAADMGNCLVPRPFAWSLDERMLRAMDLFKESVGDGILTQVWAPMKHGNDFILSTSEQPYLLDHMLAGYRDVSRQFTFSAEDKPGSFPGLPGRVFNSQIPEWTSNVGYYNKSEYLRVEHAINHEVRGSIAVPIIDTLAEPPCCAILELVTTKEKTDFDRELEIVSSALQLVNLRTTTPPRLMSQCLSNNKRAALAEIIDVLRAVCHAHRLPLALTWIPCYYSEGIGDEASRIRIKDGGRIPGEKTVLCIEESACYINDIVVGGFVHACVEHYLEEGQGAAGKALQSNRPFFCPDVKAYNISEYPLVHHARKYKLNAAVAVRLRSIHTNDDDYIIEFFLPVNMNGSEEQQLLLDNLSDTVQRMCQSLRIVSDAELHGIEGSQVQFSKEEGSHMAPDGDHDNHDSVQPMSMTNNETEAAHNQAMEGSRKQIEKKRSPVKKNVSLSVLQQYFSCSLKDAAKSLGVCPTTLKRICRQHGIARWPSRKINKVNRSLKKIRTVLDSVQGVEGGLKFDPYKGGFMSVGSSNQEINAHKSSLFRKKCSVKYPDPASGSKDSKPIAMGDGGLRQEPFPVSILESFWCDIAYHSPNSLVADEMETYLNGADKLGEHYNPTTSSMTDSSNGNLRIGNI

SEQ ID NO: 249 - skipped

SEQ ID NO: 250 - protein, 870 aa, Arachis hypogaea
MEPYPYSPKRSGASYWGSCRVQLEGSTSLDGDMSNSISDDMACSFSGLMNFDPYAGLYNSPSITDQVFNNGLPSSYPSTPGFTLEENNSSQFFRTEMNGYFNTKQGSPGYGEKIAFQQMDTLLGFFDGTDDTHSLSSMQKINGSSQHLDAIGSYIMSKPASLSLDERMLKALSVFKESAGGGILAQVWVPIKDGDQFFLTTSEQPYLLDQILAGYREVSRTYTFSTEGKPGSLPGLPGRVFMSKTPEWTSNIGYYNKNEYLRMDDAINHEVRGSIGLPISDLHSELPCCAVLELVTTNEKPDFEKEMDIVCHALQNVDLTANMPPRLLPQCLSNSKRAALTAIVDVLRSVCHAHRLPIALTWIPCCVAEDAEGKDTKIHIKEGHSSPREKNILCVEESACYVTDKAMEGFVHACIEHHLQEGKGIAGRAHQSNHPFFCPDVKAYNISEYPLVHHARKYNLNAAVAIRLRSTYTNDDDYILEFFLPVNMKGSSEQQLLLDNLSGTMQKVCRNLRTVSDEELSRMKGSHVGFKNKNVPRIFPMSRRNSQIPLTNSNHDSVRKMSIKASNQGNNGIESSHNQERNGSRRMVETKRPAEKKVSLSVLQQHFSGTLKDAARSIGVCPTTLKRICRKQGISRWPSRKIKKVNRSLKKIQTVLDTVEGLEGGLKFDPCIGALVSREGESIIQEIDAHDTLLHPENVTAKEKWVLNKGGSREDKSKHSSILVNRDDDGAVEHNHPSSSGFTNSSNDSGSNQRQNLKGKSTFADKTGLKLQAKATYGEDTVRFKFDPSWGCLKLYEEVATRFKLQNGSFQLKYLDNEQELVRLLDDSDLQECMEILDEVGKSCVRFVVRDIPCNLSSSSCSSCYLGCDS

SEQ ID NO: 251 - protein, 878 aa, Arachis hypogaea
MEDKFFSEGEGIGYWTPPGAQFDGPSMIDNGIKNLVSEEMLDNLPDLMNFDNLAGWGNIPSVTDHNLDNGISSLASMPYSPPDAFSLVEQDNDPYFMTKDCGNYNAIETSLGFDEKAVLQQLETQLGLSEDANDMNNINESLQELSAADMGNCLVPRPFAWSLNERMLRAMDLFKELVGDGILTQVWAPMRHGNDFILSTSEQPYLLDHMLAGYRDVSREFTFSAEDKPGSFPGLPGRVFISQIPEWTSNVGYYNKSEFLRVEHAIHHEVRGSIAVPIIDTLAEPPCCAVLELVTTKEKPDFDKELEIVSSALQLVNLRTTTPPRIMSQCLSNNKRAALTEIIDVLRALCHAYSLPLALTWIPCCYTEGVGDEASRIRIKDGGRIPGEKTVLCIEESACYINDIVVGGFVHACVEHYLEEGQGVAGKALQSNRPFFYSDVKAYNISAYPLVHHARKYKLNAAVAVRLRSIHTNDDDYIIEFFLPVNMNGSEEQQLLLNNLSDTMQRMCQSLRTVSDAELYGIEGSQVQFSKEEGSHMAPDGDHDSVQPMSLTNNETEAAHNQAMDGSRKQIEKKKSPAEKNISLSVLQQYFSGSLKDAAKSLGVCPTTLKKICRQHGISRWPSRKINKVNRSLKKIQTVLDSVKGVEGGLKFDPYKGGFMSGGSSNQEINAHKSSLFRKKSSVKYPDPAAGSKDSKPIAMDDGGLRQEPFPVSILESSWCDIAYHSPNTLVADEMADKLGEHHNPTTSSMSDSSNGSGSILRGSRKFENRKHLKAKSPCVDNGSKLVVKAAYGEDMIRFKFDPAAGCLQLYEEVATRFKLQIGSFQLKYLDDDEEWVRMVNDSDLKECMEILDDHGTRAVKFLVLDIPSGLSSRGSNT

SEQ ID NO: 252 - protein, 847 aa, Arachis hypogaea
MEDKFFSEGEGIGYWTPPGAQFDGPSMIDNGIKNLVSEEMLDNLPDLMNFDNLAGWVEQDNDPYFMTKDCGNYNAIETSLGFDEKAVLQQLETQLGLSEDANDMNNINESLQELSAADMGNCLVPRPFAWSLNERMLRAMDLFKELVGDGILTQVWAPMRHGNDFILSTSEQPYLLDHMLAGYRDVSREFTFSAEDKPGSFPGLPGRVFISQIPEWTSNVGYYNKSEFLRVEHAIHHEVRGSIAVPIIDTLAEPPCCAVLELVTTKEKPDFDKELEIVSSALQLVNLRTTTPPRIMSQCLSNNKRAALTEIIDVLRALCHAYSLPLALTWIPCCYTEGVGDEASRIRIKDGGRIPGEKTVLCIEESACYINDIVVGGFVHACVEHYLEEGQGVAGKALQSNRPFFYSDVKAYNISAYPLVHHARKYKLNAAVAVRLRSIHTNDDDYIIEFFLPVNMNGSEEQQLLLNNLSDTMQRMCQSLRTVSDAELYGIEGSQVQFSKEEGSHMAPDGDHDSVQPMSLTNNETEAAHNQAMDGSRKQIEKKKSPAEKNISLSVLQQYFSGSLKDAAKSLGVCPTTLKKICRQHGISRWPSRKINKVNRSLKKIQTVLDSVKGVEGGLKFDPYKGGFMSGGSSNQEINAHKSSLFRKKSSVKYPDPAAGSKDSKPIAMDDGGLRQEPFPVSILESSWCDIAYHSPNTLVADEMADKLGEHHNPTTSSMSDSSNGSGSILRGSRKFENRKHLKAKSPCVDNGSKLVVKAAYGEDMIRFKFDPAAGCLQLYEEVATRFKLQIGSFQLKYLDDDEEWVRMVNDSDLKECMEILDDHGTRAVKFLVLDIPSGLSSRGSNT

SEQ ID NO: 253 - protein, 782 aa, Arachis hypogaea
MTKDCGNYNAIETSLGFDEKAVLQQLETQLGLSEDANDMNNINESLQELSAADMGNCLVPRPFAWSLNERMLRAMDLFKELVGDGILTQVWAPMRHGNDFILSTSEQPYLLDHMLAGYRDVSREFTFSAEDKPGSFPGLPGRVFISQIPEWTSNVGYYNKSEFLRVEHAIHHEVRGSIAVPIIDTLAEPPCCAVLELVTTKEKPDFDKELEIVSSALQLVNLRTTTPPRIMSQCLSNNKRAALTEIIDVLRALCHAYSLPLALTWIPCCYTEGVGDEASRIRIKDGGRIPGEKTVLCIEESACYINDIVVGGFVHACVEHYLEEGQGVAGKALQSNRPFFYSDVKAYNISAYPLVHHARKYKLNAAVAVRLRSIHTNDDDYIIEFFLPVNMNGSEEQQLLLNNLSDTMQRMCQSLRTVSDAELYGIEGSQVQFSKEEGSHMAPDGDHDSVQPMSLTNNETEAAHNQAMDGSRKQIEKKKSPAEKNISLSVLQQYFSGSLKDAAKSLGVCPTTLKKICRQHGISRWPSRKINKVNRSLKKIQTVLDSVKGVEGGLKFDPYKGGFMSGGSSNQEINAHKSSLFRKKSSVKYPDPAAGSKDSKPIAMDDGGLRQEPFPVSILESSWCDIAYHSPNTLVADEMADKLGEHHNPTTSSMSDSSNGSGSILRGSRKFENRKHLKAKSPCVDNGSKLVVKAAYGEDMIRFKFDPAAGCLQLYEEVATRFKLQIGSFQLKYLDDDEEWVRMVNDSDLKECMEILDDHGTRAVKFLVLDIPSGLSSRGSNT

SEQ ID NO: 254 - protein, 726 aa, Arachis hypogaea
MEDQFFSEGEGIGCWTPPGVQFDGPSMIDNGIKNLVSEEMLDNLPDLMNFDNLAGWGNIPSVTDHNLDNGISSLASMPYSPHDAFSLVEQANDPYFMTKDCGNYNAIETSLGFDEKVVLQQLETQLGLSEDANDMNNINGSLQELSAADMGNCLVPRPFAWSLDEKILRAMNLFKESVGDGILTQVWAPMKHGNDFILSTSEQPYLLDHMLAGYRDVSREFTFSAEDKPGSFPGLPGRVFISQIPEWTSNVGYYNKSEYLRVEHAINHDVRGSIAVPIIDTLAEPPCCAVLELVTTKEKPDFDKELEIVSSALQLVNLRTTTPPRLMSQCLSNNKRAALTGIIDVLRAVCHAHSLPLALTWIPCYHSEGIGDEASRIRIKDGVKIPGEKTVLCIEESASYINDIVVGGFVHACVEHYLEEGQGVAGKALQSNRPFFYSDVKAYNISEYPLVHHARKYKLNAAVAVRLRSTHTNDDDYIIEFFLPVNMNGSQEQQLLLNNLSDTMQRMCQSLRTVSDAELYGIEGSQVQFSKEEGSSFCSMSRGNSHMAPDGDHDSVQPMSLTNNETEAAHNQAMDGSRKQIEKKKSPVEKNVSLSVLQQYFSGSLKDAAKSLGVCPTTLKRICRQHGIARWPSRKINKVNRSLKKIQTVLDSVQGVEGGLKFDPYKGGFMPGGSSNQEINAHKSSLFRKKCSGKYPDPASKDAVTVSPASGGKGENLVSAFRHAYI

SEQ ID NO: 255 - protein, 899 aa, Arachis hypogaea
MEDQFFSEGEGIGYWTPPGAQFDGPSMIDNGIKNLVSEEMLDNLPDLMNFDNLAGWGNIPSVTDHNLDNGISSLASMPYSPPDAFSLVEQANDPYFMTKDCGNYNAIETSLGFDEKAVLQQLETQLGLSEDANDMNNINGSLQELSAADMGNCLVPRPFAWSLDEKMLRAMSLFKESVGDGILTQVWAPMKHGNEFILSTSEQPYLLDHMLAGYRDVSREFTFSAEDKPGSFPGLPGRVFMSQIPEWTSNVGYYNKSEYLRVEHAINHEVRGSIAVPIIDTLAEPPCCAVLELVTTKEKPDFDKELEIVSSALQLVNLRTTTPPRLMSQCLSNNKRAALTEIIDVSRAVCRAHSLPLALTWIPCYYSEGIGDEASRIRIKDGCKIPGEKTVLCIEESACYINDIVVGGFVRACVEHYLEEGQGVAGKALQSNRPFFYSDVKAYNISEYPLVHHARKYKLNAAVAVRLRSIHTNDDDYIIEFFLPVIMNGSQEQQLLLDNLSDTMQRMCQSLRIVSDDELYGIEGSQVQFSKEEGSSFFSMSRGNSHMAPEGDHDSVQPMSLTNNETEAAHNQAMDGSRKQTEKKKSTVEKNVSLSVLQQYFSGSLKDAAKSLGVCPTTLKRICRQHGIARWPSRKINKVNRSLKKIQTVLDSVQGVEGGLKFDPYKGGFIPGGSSNQEINAHKSSLFRKKCSGKYPDPASKDAVTVSPASGSKDSKPIGMDDGGLRQEPFPVSILESSRCDIVYHSPNTLVADEMENYLNGADKLGEHHNPTTSSMSDSSNGSGSRKFENRKHLKAKSPCVDKGSKIIVKAAYKEDMIRFKFDPAAGCLQLYEEVATRFKLQIGSFLLKYLDDEEEWVRMVNDSDLEECIEILDDLGTRAVKFLVSDMPSGLSSSGSNS

SEQ ID NO: 256 - protein, 921 aa, Arachis hypogaea
MEDQFFSEGEGIGYWTPPGAQFDGPSMIDNGIKNLVSEEMLDNLPDLMNFDNLAGWGNIPSVTDHNLDNGISSLASMPYSPPDAFSLVEQANDPYFMTKDCGNYNAIETSLGFDEKAVLQQLETQLGLSEDANDMNNINGSLQELSAADMGNCLVPRPFAWSLDEKMLRAMSLFKESVGDGILTQVWAPMKHGNEFILSTSEQPYLLDHMLAGYRDVSREFTFSAEDKPGSFPGLPGRVFMSQIPEWTSNVGYYNKSEYLRVEHAINHEVRGSIAVPIIDTLAEPPCCAVLELVTTKEKPDFDKELEIVSSALQLVNLRTTTPPRLMSQCLSNNKRAALTEIIDVLRAVCRAHSLPLALTWIPCYYSEGIGDEASRIRTKDGRKIPGEKTVLCIEESACYTNDIVVGGFVRACVEHYLEEGQGVAGKALQSNRPFFYPDVKAYNISEYPLVHHARKYKLNAAVAIRLRSIHTNDDDYIIEFFLPVNMNGSEEQQLLLDNLAGTMQRKCQTLRKVSDAELHGIEGSSFCSMSRGNSHMAPDGDHDSVQPMSVTNNETEAAHNQAMEGSRKQIEKKRSPVKKNFSLSVLQQYFSGNLKDAAKSLGVCPTTLKRICRQHGIARWPSRKINKVNRSLKKIQTVLDSGVEGGLKFDPYKGGFMSGGSSNQEINAHKSSLFRKKCSVKYPDPAAKDAVTISPASGSKGENLAVNQLLHSDILISNSKGELKKNKAFSVDVDSKPIAMGDGGLRQEPFPVSILESSRCDVAYHSPNSLVADEMETYLNGADKLGEHHNPTTSSMTDSSSGSCSILRPSSSGSPKFENRKHLKAKSPCVRRGSKIIVKAAYGENIIRFKFDPAAGCLQLYEEVATRFKLQIGSFQLEYLDDEDEWVRMVTDTDLEECIEMFDDLGTAVKFLVREPCSNS

SEQ ID NO: 257 - protein, 899 aa, Arachis hypogaea
MEDQFFSEGEGIGYWTPPGAQFDGPSMIDNGIKNLVSEEMLDNLPDLMNFDNLAGWGNIPSVTDHNLDNGISSLASMPYSPPDAFSLVEQANDPYFMTKDCGNYNAIETSLGFDEKAVLQQLETQLGLSEDANDMNNINGSLQELSAADMGNCLVPRPFAWSLDEKMLRAMSLFKESVGDGILTQVWAPMKHGNEFILSTSEQPYLLDHMLAGYRDVSREFTFSAEDKPGSFPGLPGRVFMSQIPEWTSNVGYYNKSEYLRVEHAINHEVRGSIAVPIIDTLAEPPCCAVLELVTTKEKPDFDKELEIVSSALQLVNLRTTTPPRLMSQCLSNNKRAALTEIIDVSRAVCRAHSLPLALTWIPCYYSEGIGDEASRIRIKDGCKIPGEKTVLCIEESACYINDIVVGGFVRACVKHYLEEGQGVAGKALQSNRPFFYSDVKAYNISEYPIVHHARKYKLNAAVAVRLRSIHTNDDDYIIEFFLPVIMNGSQEQQLLLDNLSDTMQRMCQSLRIVSDDELYGIEGSQVQFSKEEGSSFFSMYRGNSHMAPEGDHDSVQPMSLTNNETEAAHNQAMDGSRKQTEKKKSTVEKNVSLSVLQQYFSGSLKDAAKSLGVCPTTLKRICRQHGIARWPSRKINKVNRSLKKIQTVLDSVQGVEGGLKFDPFKGGFIPGGSSNQEINAHKSSLFRKKCSGKYPDPAAKDAVTVSPASGSKDSKPIGMDDGGLRQEPFPVSILESSRCDIAYHSPNTLVANEMENYLNGADKLGEHHNPATSSMSDSSNDSGSRKFENRKHLKAKSPCVDKGSKIIVKAAYKEDMIRFKFDPAAGCLQLYEQVATRFKLQIGSFLLKYLDDEEEWVRMVNDSDLEECIEILDDLGTRAVKFLVSDMPSCLSSSGSNS

SEQ ID NO: 258 - protein, 894 aa, Arachis hypogaea
MEDQFFSEGEGIGYWTPPGAQFDGPSMIDNGIKNLVSEEMLDNLPDLMNFDNLAGWGNIPSVTDHNLDNGISSLASMPYSPPDAFSLVEQANDPYFMTKDCGNYNAIETSLGFDEKAVLQQLETQLGLSEDANDMNNINGSLQELSAADMGNCLVPRPFAWSLDEKMLRAMSLFKESVGDGILTQVWAPMKHGNEFILSTSEQPYLLDHMLAGYRDVSREFTFSAEDKPGSFPGLPGRVFMSQIPEWTSNVGYYNKSEYLRVEHAINHEVRGSIAVPIIDTLAEPPCCAVLELVTTKEKPDFDKELEIVSSALQLVNLRTTTPPRLMSQCLSNNKRAALTEIIDVLRAVCRAHSLPLALTWIPCYYSEGIGDEASRIRTKDGRKIPGEKTVLCIEESACYTNDIVVGGFVRACVEHYLEEGQGVAGKALQSNRPFFYPDVKAYNISEYPLVHHARKYKLNAAVAIRLRSIHTNDDDYIIEFFLPVNMNGSEEQQLLLDNLAGTMQRKCQTLRKVSDAELHGIEGSSFCSMSRGNSHMAPDGDHDSVQPMSVTNNETEAAHNQAMEGSRKQIEKKRSPVKKNFSLSVLQQYFSGNLKDAAKSLGVCPTTLKRICRQHGIARWPSRKINKVNRSLKKIQTVLDSGVEGGLKFDPYKGGFMSGGSSNQEINAHKSSLFRKKCSVKYPDPAAKDAVTISPASGSKAFSVDVDSKPIAMGDGGLRQEPFPVSILESSRCDVAYHSPNSLVADEMETYLNGADKLGEHHNPTTSSMTDSSSGSCSILRPSSSGSPKFENRKHLKAKSPCVRRGSKIIVKAAYGENIIRFKFDPAAGCLQLYEEVATRFKLQIGSFQLEYLDDEDEWVRMVTDTDLEECIEMFDDLGTAVKFLVREPCSNS

SEQ ID NO: 259 - protein, 890 aa, Arachis hypogaea
MEDQFFSEGEGIGYWTPPGAQFDGPSMIDNGIKNLVSEEMLDNLPDLMNFDNLAGWVEQANDPYFMTKDCGNYNAIETSLGFDEKAVLQQLETQLGLSEDANDMNNINGSLQELSAADMGNCLVPRPFAWSLDEKMLRAMSLFKESVGDGILTQVWAPMKHGNEFILSTSEQPYLLDHMLAGYRDVSREFTFSAEDKPGSFPGLPGRVFMSQIPEWTSNVGYYNKSEYLRVEHAINHEVRGSIAVPIIDTLAEPPCCAVLELVTTKEKPDFDKELEIVSSALQLVNLRTTTPPRLMSQCLSNNKRAALTEIIDVLRAVCRAHSLPLALTWIPCYYSEGIGDEASRIRTKDGRKIPGEKTVLCIEESACYTNDIVVGGFVRACVEHYLEEGQGVAGKALQSNRPFFYPDVKAYNISEYPLVHHARKYKLNAAVAIRLRSIHTNDDDYIIEFFLPVNMNGSEEQQLLLDNLAGTMQRKCQTLRKVSDAELHGIEGSSFCSMSRGNSHMAPDGDHDSVQPMSVTNNETEAAHNQAMEGSRKQIEKKRSPVKKNFSLSVLQQYFSGNLKDAAKSLGVCPTTLKRICRQHGIARWPSRKINKVNRSLKKIQTVLDSGVEGGLKFDPYKGGFMSGGSSNQEINAHKSSLFRKKCSVKYPDPAAKDAVTISPASGSKGENLAVNQLLHSDILISNSKGELKKNKAFSVDVDSKPIAMGDGGLRQEPFPVSILESSRCDVAYHSPNSLVADEMETYLNGADKLGEHHNPTTSSMTDSSSGSCSILRPSSSGSPKFENRKHLKAKSPCVRRGSKIIVKAAYGENIIRFKFDPAAGCLQLYEEVATRFKLQIGSFQLEYLDDEDEWVRMVTDTDLEECIEMFDDLGTAVKFLVREPCSNS

SEQ ID NO: 260 - protein, 888 aa, Arachis hypogaea
MEDQFFSEGEGIGYWTPPGAQFDGPSMIDNGIKNLVSEEMLDNLPDLMNFDNLAGWGNIPSVTDHNLDNGISSLASMPYSPPDAFSLVEQANDPYFMTKDCGNYNAIETSLGFDEKAVLQQLETQLGLSEDANDMNNINGSLQELSAADMGNCLVPRPFAWSLDEKMLRAMSLFKESVGDGILTQVWAPMKHGNEFILSTSEQPYLLDHMLAGYRDVSREFTFSAEDKPGSFPGLPGRVFMSQIPEWTSNVGYYNKSEYLRVEHAINHEVRGSIAVPIIDTLAEPPCCAVLELVTTKEKPDFDKELEIVSSALQLVNLRTTTPPRLMSQCLSNNKRAALTEIIDVLRAVCRAHSLPLALTWIPCYYSEGIGDEASRIRTKDGRKIPGEKTVLCIEESACYTNDIVVGGFVRACVEHYLEEGQGVAGKALQSNRPFFYPDVKAYNISEYPLVHHARKYKLNAAVAIRLRSIHTNDDDYIIEFFLPVNMNGSEEQQLLLDNLAGTMQRKCQTLRKVSDAELHGIEGSSFCSMSRGNSHMAPDGDHDSVQPMSVTNNETEAAHNQAMEGSRKQIEKKRSPVKKNFSLSVLQQYFSGNLKDAAKSLGVCPTTLKRICRQHGIARWPSRKINKVNRSLKKIQTVLDSGVEGGLKFDPYKGGFMSGGSSNQEINAHKSSLFRKKCSVKYPDPAAKDAVTISPASGSKDSKPIAMGDGGLRQEPFPVSILESSRCDVAYHSPNSLVADEMETYLNGADKLGEHHNPTTSSMTDSSSGSCSILRPSSSGSPKFENRKHLKAKSPCVRRGSKIIVKAAYGENIIRFKFDPAAGCLQLYEEVATRFKLQIGSFQLEYLDDEDEWVRMVTDTDLEECIEMFDDLGTAVKFLVREPCSNS

SEQ ID NO: 261 - protein, 825 aa, Arachis hypogaea
MTKDCGNYNAIETSLGFDEKAVLQQLETQLGLSEDANDMNNINGSLQELSAADMGNCLVPRPFAWSLDEKMLRAMSLFKESVGDGILTQVWAPMKHGNEFILSTSEQPYLLDHMLAGYRDVSREFTFSAEDKPGSFPGLPGRVFMSQIPEWTSNVGYYNKSEYLRVEHAINHEVRGSIAVPIIDTLAEPPCCAVLELVTTKEKPDFDKELEIVSSALQLVNLRTTTPPRLMSQCLSNNKRAALTEIIDVLRAVCRAHSLPLALTWIPCYYSEGIGDEASRIRTKDGRKIPGEKTVLCIEESACYTNDIVVGGFVRACVEHYLEEGQGVAGKALQSNRPFFYPDVKAYNISEYPLVHHARKYKLNAAVAIRLRSIHTNDDDYIIEFFLPVNMNGSEEQQLLLDNLAGTMQRKCQTLRKVSDAELHGIEGSSFCSMSRGNSHMAPDGDHDSVQPMSVTNNETEAAHNQAMEGSRKQIEKKRSPVKKNFSLSVLQQYFSGNLKDAAKSLGVCPTTLKRICRQHGIARWPSRKINKVNRSLKKIQTVLDSGVEGGLKFDPYKGGFMSGGSSNQEINAHKSSLFRKKCSVKYPDPAAKDAVTISPASGSKGENLAVNQLLHSDILISNSKGELKKNKAFSVDVDSKPIAMGDGGLRQEPFPVSILESSRCDVAYHSPNSLVADEMETYLNGADKLGEHHNPTTSSMTDSSSGSCSILRPSSSGSPKFENRKHLKAKSPCVRRGSKIIVKAAYGENIIRFKFDPAAGCLQLYEEVATRFKLQIGSFQLEYLDDEDEWVRMVTDTDLEECIEMFDDLGTAVKFLVREPCSNS

SEQ ID NO: 262 - protein, 875 aa, Arachis hypogaea
MEDQFFSEGEGIGYWTPPGAQFDGPSMIDNGIKNLVSEEKLDNLPDLMNFDNLAGWGNIPSVTDHNLDNGISSLASMPYSPPDAYSLVEQANDPYFMTKDCGNYNAIETSLGFDDKVVLQQLETQLGLSEDANDMNNINGSLQELSAADMGNCLVPRPFAWSLDEKMLRAMNLFKESVGDGILTQVWAPMKHGNDFILSTSEQPYLLDHMLAGYRDVSREFTFSAEDKPGSFPGLPGRVFMSQIPEWTSNVGYYNKSEYMRVEHAINHEVRGSIAVPIIDTLAEPPCCAVLELVTTKEKPDFDKELKIVSSALQLVNLRTTTSPRLMSQCLSNNKRAALTEIIDVLRAVCHAHSLPLALTWIPCYYSEGIGDEASRIRIKDGGKIPGEKTVLCIEESACYINDIVVGGFVHACVEHYLEEGQGVAGKALQLNRPFFYSDVKAYNISEYPLVHHARKYKLNAAVAVRLRSIHTNDDDYMIEFFLPVNMNGSQEQQLLLDNLSGTMQRMCQSLRTVSDAKLYGIEGSQVQFSKEEGSSFCSMSRGNSHMAPDGDHDSVQPMSVTNNETEAAHNQAMDGSRKQIEKKKSPVEKNVSLSVLQQYFSGSLKDAAKSLGVCPTTLKRICRQHGIARWPSRKINKVNHSLKKIQTVLDSVQGVEGGLKFDPYKGGFMPGGSSNQEINAHKSSLFWKKCSGKFPDPASKDAVTVSPASGSKDSKPIAMDDGGLRQEPFRVSILESSRCDIAYHSPNTLGEHHNPTTSSMSDSSNGSGSRKFENRKHLKAKSPCLDKGSKISVKAAYKEDMIRFKFDPAAGCLQLYEEVATRFKLQIGSFLLKYLDDEEKWVMMVNDSDLEEFIEISDDLRTRAVKFLVSDLVV

SEQ ID NO: 263 - protein, 844 aa, Arachis hypogaea
MEDQFFSEGEGIGYWTPPGAQFDGPSMIDNGIKNLVSEEKLDNLPDLMNFDNLAGWVEQANDPYFMTKDCGNYNAIETSLGFDDKVVLQQLETQLGLSEDANDMNNINGSLQELSAADMGNCLVPRPFAWSLDEKMLRAMNLFKESVGDGILTQVWAPMKHGNDFILSTSEQPYLLDHMLAGYRDVSREFTFSAEDKPGSFPGLPGRVFMSQIPEWTSNVGYYNKSEYMRVEHAINHEVRGSIAVPIIDTLAEPPCCAVLELVTTKEKPDFDKELKIVSSALQLVNLRTTTSPRLMSQCLSNNKRAALTEIIDVLRAVCHAHSLPLALTWIPCYYSEGIGDEASRIRIKDGGKIPGEKTVLCIEESACYINDIVVGGFVHACVEHYLEEGQGVAGKALQLNRPFFYSDVKAYNISEYPLVHHARKYKLNAAVAVRLRSIHTNDDDYMIEFFLPVNMNGSQEQQLLLDNLSGTMQRMCQSLRTVSDAKLYGIEGSQVQFSKEEGSSFCSMSRGNSHMAPDGDHDSVQPMSVTNNETEAAHNQAMDGSRKQIEKKKSPVEKNVSLSVLQQYFSGSLKDAAKSLGVCPTTLKRICRQHGIARWPSRKINKVNHSLKKIQTVLDSVQGVEGGLKFDPYKGGFMPGGSSNQEINAHKSSLFWKKCSGKFPDPASKDAVTVSPASGSKDSKPIAMDDGGLRQEPFRVSILESSRCDIAYHSPNTLGEHHNPTTSSMSDSSNGSGSRKFENRKHLKAKSPCLDKGSKISVKAAYKEDMIRFKFDPAAGCLQLYEEVATRFKLQIGSFLLKYLDDEEKWVMMVNDSDLEEFIEISDDLRTRAVKFLVSDLVV

SEQ ID NO: 264 - protein, 779 aa, Arachis hypogaea
MTKDCGNYNAIETSLGFDDKVVLQQLETQLGLSEDANDMNNINGSLQELSAADMGNCLVPRPFAWSLDEKMLRAMNLFKESVGDGILTQVWAPMKHGNDFILSTSEQPYLLDHMLAGYRDVSREFTFSAEDKPGSFPGLPGRVFMSQIPEWTSNVGYYNKSEYMRVEHAINHEVRGSIAVPIIDTLAEPPCCAVLELVTTKEKPDFDKELKIVSSALQLVNLRTTTSPRLMSQCLSNNKRAALTEIIDVLRAVCHAHSLPLALTWIPCYYSEGIGDEASRIRIKDGGKIPGEKTVLCIEESACYINDIVVGGFVHACVEHYLEEGQGVAGKALQLNRPFFYSDVKAYNISEYPLVHHARKYKLNAAVAVRLRSIHTNDDDYMIEFFLPVNMNGSQEQQLLLDNLSGTMQRMCQSLRTVSDAKLYGIEGSQVQFSKEEGSSFCSMSRGNSHMAPDGDHDSVQPMSVTNNETEAAHNQAMDGSRKQIEKKKSPVEKNVSLSVLQQYFSGSLKDAAKSLGVCPTTLKRICRQHGIARWPSRKINKVNHSLKKIQTVLDSVQGVEGGLKFDPYKGGFMPGGSSNQEINAHKSSLFWKKCSGKFPDPASKDAVTVSPASGSKDSKPIAMDDGGLRQEPFRVSILESSRCDIAYHSPNTLGEHHNPTTSSMSDSSNGSGSRKFENRKHLKAKSPCLDKGSKISVKAAYKEDMIRFKFDPAAGCLQLYEEVATRFKLQIGSFLLKYLDDEEKWVMMVNDSDLEEFIEISDDLRTRAVKFLVSDLVV

SEQ ID NO: 265 - protein, 863 aa, Arachis hypogaea
MEDQFFSEGEGIGYWTPPGAQFDGPSMIDNGIKNLVSEEMLDNLPDLMNFDNLAGWGNIPSVTDRNLDNGISSLASMQYSPPDAFNLVEQDNDPYFMTKDCGNYNATETSLGFDEKAVLQQLETQLGLSEDANDMNNINGSLQELSAADMGNCLVPRPFAWSLDERMLRAMDLFKESVGDGILTQVWAPMKHGNDFILSTSEQPYLLDHMLAGYRDVSRQFTFSAEDKPGSFPGLPGRVFISQIPEWTSNVGYYNKSEYLRVEHAINHEVRGSIAVPIIDTLAEPPCCAVLELVTTKEKTDFDKELEIVSSALQLVNLRTTTPPRLMSQCLSNNKRAALTEIIDVLRAVCNAHRLPLALTWIPCYYSEGVGDEASRIRIKDGRKIPGEKTVLCIEESACYINDIVVGGFVHACVEHYLEEGQGVAGKALQSNRSSFYSDVKAYNISEYPLVHHARKYKLNAAVAVRLRSIHTNDDDYIIEFFLPVNMNGSEEQQLLLDNLSDTVQRMCQSLRIVSDAELHGVEGSQVQFSKEEGSHMAPDGDHDLVQPMSMTNNETEAAHNQAMDGSRKQTEKKKSSVEKNFSLSVLQQYFSGSLKDAAKSLGVCPTTLKRICRQHGISRWPSRKINKVNRSLKKIQTVLDSVKGVEGGLEFDPYKGGFMPGGSSNQEINAHKSSLFGKKCSGSKDSKPIAMDDGGLRQEPFPVSILESSWCDIAYHSPNTLVADEMADKLGEHHNPTTSSMSDSSNGSGSILRGSRKFEKRKHLKAKSPCVDSGSKINVKAVYKEDMIRFKFDPAAGCLQLYEEVATRFKLQIGSFQLKYLDDDEEWVMIVTDSDLQECIEILDDLGTRAVKFLVRETCLVV

SEQ ID NO: 266 - protein, 832 aa, Arachis hypogaea
MEDQFFSEGEGIGYWTPPGAQFDGPSMIDNGIKNLVSEEMLDNLPDLMNFDNLAGWVEQDNDPYFMTKDCGNYNATETSLGFDEKAVLQQLETQLGLSEDANDMNNINGSLQELSAADMGNCLVPRPFAWSLDERMLRAMDLFKESVGDGILTQVWAPMKHGNDFILSTSEQPYLLDHMLAGYRDVSRQFTFSAEDKPGSFPGLPGRVFISQIPEWTSNVGYYNKSEYLRVEHAINHEVRGSIAVPIIDTLAEPPCCAVLELVTTKEKTDFDKELEIVSSALQLVNLRTTTPPRLMSQCLSNNKRAALTEIIDVLRAVCNAHRLPLALTWIPCYYSEGVGDEASRIRIKDGRKIPGEKTVLCIEESACYINDIVVGGFVHACVEHYLEEGQGVAGKALQSNRSSFYSDVKAYNISEYPLVHHARKYKLNAAVAVRLRSIHTNDDDYIIEFFLPVNMNGSEEQQLLLDNLSDTVQRMCQSLRIVSDAELHGVEGSQVQFSKEEGSHMAPDGDHDLVQPMSMTNNETEAAHNQAMDGSRKQTEKKKSSVEKNFSLSVLQQYFSGSLKDAAKSLGVCPTTLKRICRQHGISRWPSRKINKVNRSLKKIQTVLDSVKGVEGGLEFDPYKGGFMPGGSSNQEINAHKSSLFGKKCSGSKDSKPIAMDDGGLRQEPFPVSILESSWCDIAYHSPNTLVADEMADKLGEHHNPTTSSMSDSSNGSGSILRGSRKFEKRKHLKAKSPCVDSGSKINVKAVYKEDMIRFKFDPAAGCLQLYEEVATRFKLQIGSFQLKYLDDDEEWVMIVTDSDLQECIEILDDLGTRAVKFLVRETCLVV

SEQ ID NO: 267 - protein, 767 aa, Arachis hypogaea
MTKDCGNYNATETSLGFDEKAVLQQLETQLGLSEDANDMNNINGSLQELSAADMGNCLVPRPFAWSLDERMLRAMDLFKESVGDGILTQVWAPMKHGNDFILSTSEQPYLLDHMLAGYRDVSRQFTFSAEDKPGSFPGLPGRVFISQIPEWTSNVGYYNKSEYLRVEHAINHEVRGSIAVPIIDTLAEPPCCAVLELVTTKEKTDFDKELEIVSSALQLVNLRTTTPPRLMSQCLSNNKRAALTEIIDVLRAVCNAHRLPLALTWIPCYYSEGVGDEASRIRIKDGRKIPGEKTVLCIEESACYINDIVVGGFVHACVEHYLEEGQGVAGKALQSNRSSFYSDVKAYNISEYPLVHHARKYKLNAAVAVRLRSIHTNDDDYIIEFFLPVNMNGSEEQQLLLDNLSDTVQRMCQSLRIVSDAELHGVEGSQVQFSKEEGSHMAPDGDHDLVQPMSMTNNETEAAHNQAMDGSRKQTEKKKSSVEKNFSLSVLQQYFSGSLKDAAKSLGVCPTTLKRICRQHGISRWPSRKINKVNRSLKKIQTVLDSVKGVEGGLEFDPYKGGFMPGGSSNQEINAHKSSLFGKKCSGSKDSKPIAMDDGGLRQEPFPVSILESSWCDIAYHSPNTLVADEMADKLGEHHNPTTSSMSDSSNGSGSILRGSRKFEKRKHLKAKSPCVDSGSKINVKAVYKEDMIRFKFDPAAGCLQLYEEVATRFKLQIGSFQLKYLDDDEEWVMIVTDSDLQECIEILDDLGTRAVKFLVRETCLVV

SEQ ID NO: 268 - protein, 582 aa, Arachis hypogaea
MLYFHMDLKTSYSDWLFSVRCLSNNKRAALTEIIDVLRAVCGAHSLPLALTWIPCYYSEGIGDEASRIRTKEGRKLPGEKTVLCIEESACYMNDIVVGGFVRACVEHYLEEGQGAAGKALQSNRPFFCPDVKAYNISEYPLVHHARKYKLNAAVAIRLRSTHTNDDDYIIEFFLPVNMNRCQEQQVLLENLSRTMQRMCQTLRKVSDAELYGIEGSQVQFSKEEGSHMAPDGNHDNHDSVQPMSMTNNETEAAHNQAMEGSRKQIEKKRSPVKKNVSLSVLQQYFSCNLKDAAKSLGVCPTTLKRICRQHGIARWPSRKINKVNRSLKKIRTVLDSVQGVEGGLKFDPYKGGFISVGSSNQEINAHKSSLFRKKCSVKYPDPASGSKDSKPIAMGDGGLRQEPFPVSILESSRCDIAYHSPNSLVADEMETYLNGADKLGEHYNPTTSSMTDSSNGSCSILRSSSSASGKFENRKHLKAKSPCVDSGSKIIVKAAYGEDLIRFKFDPAAGCLQLYEEVAARFKLQIGSFQLKYLDDEEEWVRMVNDSDLEDCIEMLDDLGTRAVKLLVHDMPSGLSSLGSNG

SEQ ID NO: 269 - protein, 832 aa, Arachis hypogaea
MEDQFFSEGEGIGYWTPPGAQFDGPSMIDNGIKNLVSEEMLDNLPDLMNFDNLAGWVEQDNDPYFMTKDCGNYNATETSLGFDEKAVLQQLETQLGLSEDANDMNNINGSLQELSAADMGNCLVPRPFAWSLDERMLRAMDLFKESVGDGILTQVWAPMKHGNDFILSTSEQPYLLDHMLAGYRDVSRQFTFSAEDKPGSFPGLPGRVFISQIPEWTSNVGYYNKSEYLRVEHAINHEVRGSIAVPIIDTLAEPPCCAVLELVTTKEKTDFDKELEIVSSALQLVNLRTTTPPRLMSQCLSNNKRAALTEIIDVLRAVCNAHRLPLALTWIPCYYSEGVGDEASRIRIKDGRKIPGEKTVLCIEESACYINDIVVGGFVHACVEHYLEEGQGVAGKALQSNRSSFYSDVKAYNISEYPLVHHARKYKLNAAVAVRLRSIHTNDDDYIIEFFLPVNMNGSEEQQLLLDNLSDTVQRMCQSLRIVSDAELHGVEGSQVQFSKEEGSHMAPDGDHDLVQPMSMTNNETEAAHNQAMDGSRKQTEKKKSSVEKNFSLSVLQQYFSGSLKDAAKSLGVCPTTLKRICRQHGISRWPSRKINKVNRSLKKIQTVLDSVKGVEGGLEFDPYKGGFMPGGSSNQEINAHKSSLFGKKCSGSKDSKPIAMDDGGLRQEPFPVSILESSWCDIAYHSPNTLVADEMADKLGEHHNPTTSSMSDSSNGSGSILRGSRKFEKRKHLKAKSPCVDSGSKINVKAVYKEDMIRFKFDPAAGCLQLYEEVATRFKLQIGSFQLKYLDDDEEWVMIVTDSDLQECIEILDDLGTRAVKFLVSETCLVV

SEQ ID NO: 270 - protein, 767 aa, Arachis hypogaea
MTKDCGNYNATETSLGFDEKAVLQQLETQLGLSEDANDMNNINGSLQELSAADMGNCLVPRPFAWSLDERMLRAMDLFKESVGDGILTQVWAPMKHGNDFILSTSEQPYLLDHMLAGYRDVSRQFTFSAEDKPGSFPGLPGRVFISQIPEWTSNVGYYNKSEYLRVEHAINHEVRGSIAVPIIDTLAEPPCCAVLELVTTKEKTDFDKELEIVSSALQLVNLRTTTPPRLMSQCLSNNKRAALTEIIDVLRAVCNAHRLPLALTWIPCYYSEGVGDEASRIRIKDGRKIPGEKTVLCIEESACYINDIVVGGFVHACVEHYLEEGQGVAGKALQSNRSSFYSDVKAYNISEYPLVHHARKYKLNAAVAVRLRSIHTNDDDYIIEFFLPVNMNGSEEQQLLLDNLSDTVQRMCQSLRIVSDAELHGVEGSQVQFSKEEGSHMAPDGDHDLVQPMSMTNNETEAAHNQAMDGSRKQTEKKKSSVEKNFSLSVLQQYFSGSLKDAAKSLGVCPTTLKRICRQHGISRWPSRKINKVNRSLKKIQTVLDSVKGVEGGLEFDPYKGGFMPGGSSNQEINAHKSSLFGKKCSGSKDSKPIAMDDGGLRQEPFPVSILESSWCDIAYHSPNTLVADEMADKLGEHHNPTTSSMSDSSNGSGSILRGSRKFEKRKHLKAKSPCVDSGSKINVKAVYKEDMIRFKFDPAAGCLQLYEEVATRFKLQIGSFQLKYLDDDEEWVMIVTDSDLQECIEILDDLGTRAVKFLVSETCLVV

SEQ ID NO: 271 - protein, 870 aa, Arachis ipaensis
MEPYPYSPKRSGASYWGSCRVQLEGSTSLDGDMSNSISDDMACSFSGLMNIDPYAGLYNSPSITDQVFSNGLPSSYPSTPGFNLEENNSSQFFMTEMNGYFNTKQGSPGYGEKIAFQQMDPLLGFFDGTDDTHSLSSMQKINGSSQHLDAIGSYIMSKPASLSLDERMLKALSVFKESAGGGILAQVWVPIKDGDQFFLTTSEQPYLLDQILAGYREVSRTYTFSTEGKPGSLPGLPGRVFMSKTPEWTSNIGYYNKNEYLRMDDAINHEVRGSIGLPISDLHSELPCCAVLELVTTNEKPDFEKEMDIVCHALQNVDLMANMPPRLLPQCLSNSKRAALTAIVDVLRSVCHAHRLPMALTWIPCCVAEDAEGKDTKIHIKEGHSSPREKNILCVEESACYVTDKAMEGFVHACIEHHLQEGKGIAGRAHQSNHPFFCPDVKAYNISEYPLVHHARKYNLNAAVAIRLRSTYTNDDDYILEFFLPVNMKGSSEQQLLLDNLSGTMQKVCRNLRTVSDEELSRMKSSQVGFKNKNVPRIFPMSRRNSQIPLTNSNHDSVRKMSIKASNQGNNGIESSHNQERNRSRRMVETKRPAEKKVSLSVLQQHFSGTLKDAARSIGVCPTTLKRICRKQGISRWPSRKIKKVNRSLKKIQTVLDTVEGLEGGLKFDPCIGALVSREGESIIQEIDAHDTLLHPENVTAKEKWILNKGGSREDKSKHSSILVNRDDDGAVEHNHPSSSGFTNSSNDSGSNQRQNLKGKSTFADKTGLKLQAKATYGEDTVRFKFDPSWGCLKLYEEVATRFKLQNGSFQLKYLDDEQELVRLLDDSDLQECIEILDEAGKSCVRFVVRDIPCNLSSSSCSSCYLGCDS

SEQ ID NO: 272 - skipped

SEQ ID NO: 273 - protein, 875 aa, Arachis ipaensis
MEDQFFSEGEGIGYWTPPGAQFDGPSMIDNGIKNLVSEEKLDNLPDLMNFDNLAGWGNIPSVTDHNLDNGISSLASMPYSPPDAYSLVEQANDPYFMTKDCGNYNAIETSLGFDEKAVLQQLETQLGLSEDANDMNNINGSLQELSAADMGNCLVPRPFAWSLDEKMLRAMNLFKESVGDGILTQVWAPMKHGNDFILSTSEQPYLLDHMLAGYRDVSREFTFSAEDKPGSFPGLPGRVFMSQIPEWTSNVGYYNKSEYLRVEHAINHEVRGSIAVPIIDTLAEPPCCAVLELVTTKEKPDFDKELEIVSSALQLVNLRTTTSPRLMSQCLSNNKRAALTEIIDVLRAVCHAHSLPLALTWIPCYYSEGIGDEASRIRIKDGGKIPGEKTVLCIEESACYINDIVVGGFVHACVEHYLEEGQGVAGKALQLNRPFFYSDVKAYNISEYPLVHHARKYKLNAAVAVRLRSIHTNDDDYMIEFFLPVNMNGSQEQQLLLDNLSGTMQRMCQSLRTVSDAKLYGIEGSQVQFSKEEGSSFCSMSRGNSHMAPDGDHDSVQPMSVTNNETEAAHNQAMDGSRKQIEKKKSPVEKNVSLSVLQQYFSGSLKDAAKSLGVCPTTLKRICRQHGIARWPSRKINKVNHSLKKIQTVLDSVQGVEGGLKFDPYKGGFMPGGSSNQEINAHKSSLFWKKCSGKFPDPASKDAVTVSPASGSKDSKPIAMDDGGLRQEPFRVSILESSRCDIAYHSPNTLGEHHNPTTSSMSDSSNGSGSRKFENRKHLKAKSPCLDKGSKIIVKAAYKEDMIRFKFDPAAGCLQLYEQVATRFKLQIGSFQLKYLDDEEKWVMMVNDSDLEEFIEISDDLRTRAVKFLVSDLVV

SEQ ID NO: 274 - protein, 865 aa, Arachis ipaensis
MEDQFFSEGEGIGYWTPPGAQFDGPSMIDNGIKNLVSEEKLDNLPDLMNFDNLAGWGNIPSVTDHNLDNGISSLASMPYSPPDAYSLVEQANDPYFMTKDCGNYNAIETSLGFDEKAVLQQLETQLGLSEDANDMNNINGSLQELSAADMGNCLVPRPFAWSLDEKMLRAMNLFKESVGDGILTQVWAPMKHGNDFILSTSEQPYLLDHMLAGYRDVSREFTFSAEDKPGSFPGLPGRVFMSQIPEWTSNVGYYNKSEYLRVEHAINHEVRGSIAVPIIDTLAEPPCCAVLELVTTKEKPDFDKELEIVSSALQLVNLRTTTSPRLMSQCLSNNKRAALTEIIDVLRAVCHAHSLPLALTWIPCYYSEGIGDEASRIRIKDGGKIPGEKTVLCIEESACYINDIVVGGFVHACVEHYLEEGQGVAGKALQLNRPFFYSDVKAYNISEYPLVHHARKYKLNAAVAVRLRSIHTNDDDYMIEFFLPVNMNGSQEQQLLLDNLSGTMQRMCQSLRTVSDAKLYGIEGSQVQFSKEEGSHMAPDGDHDSVQPMSVTNNETEAAHNQAMDGSRKQIEKKKSPVEKNVSLSVLQQYFSGSLKDAAKSLGVCPTTLKRICRQHGIARWPSRKINKVNHSLKKIQTVLDSVQGVEGGLKFDPYKGGFMPGGSSNQEINAHKSSLFWKKCSGKFPDPASKDAVTVSPASGSKDSKPIAMDDGGLRQEPFRVSILESSRCDIAYHSPNTLGEHHNPTTSSMSDSSNGSGSRKFENRKHLKAKSPCLDKGSKIIVKAAYKEDMIRFKFDPAAGCLQLYEQVATRFKLQIGSFQLKYLDDEEKWVMMVNDSDLEEFIEISDDLRTRAVKFLVSDLVV

SEQ ID NO: 275 - protein, 865 aa, Arachis ipaensis
MEDQFFSEGEGIGYWTPPGAQFDGPSMIDNGIKNLVSEEKLDNLPDLMNFDNLAGWGNIPSVTDHNLDNGISSLASMPYSPPDAYSLVEQANDPYFMTKDCGNYNAIETSLGFDEKAVLQQLETQLGLSEDANDMNNINGSLQELSAADMGNCLVPRPFAWSLDEKMLRAMNLFKESVGDGILTQVWAPMKHGNDFILSTSEQPYLLDHMLAGYRDVSREFTFSAEDKPGSFPGLPGRVFMSQIPEWTSNVGYYNKSEYLRVEHAINHEVRGSIAVPIIDTLAEPPCCAVLELVTTKEKPDFDKELEIVSSALQLVNLRTTTSPRLMSQCLSNNKRAALTEIIDVLRAVCHAHSLPLALTWIPCYYSEGIGDEASRIRIKDGGKIPGEKTVLCIEESACYINDIVVGGFVHACVEHYLEEGQGVAGKALQLNRPFFYSDVKAYNISEYPLVHHARKYKLNAAVAVRLRSIHTNDDDYMIEFFLPVNMNGSQEQQLLLDNLSGTMQRMCQSLRTVSDAKLYGIEGSQVQFSKEEGSSFCSMSRGNSHMAPDGDHDSVQPMSVTNNETEAAHNQAMDGSRKQIEKKKSPVEKNVSLSVLQQYFSGSLKDAAKSLGVCPTTLKRICRQHGIARWPSRKINKVNHSLKKIQTVLDSVQGVEGGLKFDPYKGGFMPGGSSNQEINAHKSSLFWKKCSGKFPDPASGSKDSKPIAMDDGGLRQEPFRVSILESSRCDIAYHSPNTLGEHHNPTTSSMSDSSNGSGSRKFENRKHLKAKSPCLDKGSKIIVKAAYKEDMIRFKFDPAAGCLQLYEQVATRFKLQIGSFQLKYLDDEEKWVMMVNDSDLEEFIEISDDLRTRAVKFLVSDLVV

SEQ ID NO: 276 - protein, 847 aa, Arachis ipaensis
MEDQFFSEGEGIGYWTPPGAQFDGPSMIDNGIKNLVSEEKLDNLPDLMNFDNLAGWGNIPSVTDHNLDNGISSLASMPYSPPDAYSLVEQANDPYFMTKDCGNYNAIETSLGFDEKAVLQQLETQLGLSEDANDMNNINGSLQELSAADMGNCLVPRPFAWSLDEKMLRAMNLFKESVGDGILTQVWAPMKHGNDFILSTSEQPYLLDHMLAGYRDVSREFTFSAEDKPGSFPGLPGRVFMSQIPEWTSNVGYYNKSEYLRVEHAINHEVRGSIAVPIIDTLAEPPCCAVLELVTTKEKPDFDKELEIVSSALQLVNLRTTTSPRLMSQCLSNNKRAALTEIIDVLRAVCHAHSLPLALTWIPCYYSEGIGDEASRIRIKDGGKIPGEKTVLCIEESACYINDIVVGGFVHACVEHYLEEGQGVAGKALQLNRPFFYSDVKAYNISEYPLVHHARKYKLNAAVAVRLRSIHTNDDDYMIEFFLPVNMNGSQEQQLLLDNLSGTMQRMCQSLRTVSDAKLYGIEGSQVQFSKEEGSHMAPDGDHDSVQPMSVTNNETEAAHNQAMDGSRKQIEKKKSPVEKNVSLSVLQQYFSGSLKDAAKSLGVCPTTLKRICRQHGIARWPSRKINKVNHSLKKIQTVLDSVQGVEGGLKFDPYKGGFMPGGSSNQEINAHKSSLFWKKCSGSKDSKPIAMDDGGLRQEPFRVSILESSRCDIAYHSPNTLGEHHNPTTSSMSDSSNGSGSRKFENRKHLKAKSPCLDKGSKIIVKAAYKEDMIRFKFDPAAGCLQLYEQVATRFKLQIGSFQLKYLDDEEKWVMMVNDSDLEEFIEISDDLRTRAVKFLVSDLVV

SEQ ID NO: 277 - protein, 834 aa, Arachis ipaensis
MEDQFFSEGEGIGYWTPPGAQFDGPSMIDNGIKNLVSEEKLDNLPDLMNFDNLAGWVEQANDPYFMTKDCGNYNAIETSLGFDEKAVLQQLETQLGLSEDANDMNNINGSLQELSAADMGNCLVPRPFAWSLDEKMLRAMNLFKESVGDGILTQVWAPMKHGNDFILSTSEQPYLLDHMLAGYRDVSREFTFSAEDKPGSFPGLPGRVFMSQIPEWTSNVGYYNKSEYLRVEHAINHEVRGSIAVPIIDTLAEPPCCAVLELVTTKEKPDFDKELEIVSSALQLVNLRTTTSPRLMSQCLSNNKRAALTEIIDVLRAVCHAHSLPLALTWIPCYYSEGIGDEASRIRIKDGGKIPGEKTVLCIEESACYINDIVVGGFVHACVEHYLEEGQGVAGKALQLNRPFFYSDVKAYNISEYPLVHHARKYKLNAAVAVRLRSIHTNDDDYMIEFFLPVNMNGSQEQQLLLDNLSGTMQRMCQSLRTVSDAKLYGIEGSQVQFSKEEGSHMAPDGDHDSVQPMSVTNNETEAAHNQAMDGSRKQIEKKKSPVEKNVSLSVLQQYFSGSLKDAAKSLGVCPTTLKRICRQHGIARWPSRKINKVNHSLKKIQTVLDSVQGVEGGLKFDPYKGGFMPGGSSNQEINAHKSSLFWKKCSGKFPDPASKDAVTVSPASGSKDSKPIAMDDGGLRQEPFRVSILESSRCDIAYHSPNTLGEHHNPTTSSMSDSSNGSGSRKFENRKHLKAKSPCLDKGSKIIVKAAYKEDMIRFKFDPAAGCLQLYEQVATRFKLQIGSFQLKYLDDEEKWVMMVNDSDLEEFIEISDDLRTRAVKFLVSDLVV

SEQ ID NO: 278 - protein, 779 aa, Arachis ipaensis
MEDQFFSEGEGIGYWTPPGAQFDGPSMIDNGIKNLVSEEKLDNLPDLMNFDNLAGWGNIPSVTDHNLDNGISSLASMPYSPPDAYSLVEQANDPYFMTKDCGNYNAIETSLGFDEKAVLQQLETQLGLSEDANDMNNINGSLQELSAADMGNCLVPRPFAWSLDEKMLRAMNLFKESVGDGILTQVWAPMKHGNDFILSTSEQPYLLDHMLAGYRDVSREFTFSAEDKPGSFPGLPGRVFMSQIPEWTSNVGYYNKSEYLRVEHAINHEVRGSIAVPIIDTLAEPPCCAVLELVTTKEKPDFDKELEIVSSALQLVNLRTTTSPRLMSQCLSNNKRAALTEIIDVLRAVCHAHSLPLALTWIPCYYSEGIGDEASRIRIKDGGKIPGEKTVLCIEESACYINDIVVGGFVHACVEHYLEEGQGVAGKALQLNRPFFYSDVKAYNISEYPLVHHARKYKLNAAVAVRLRSIHTNDDDYMIEFFLPVNMNGSQEQQLLLDNLSGTMQRMCQSLRTVSDAKLYGIEGSQVQFSKEEGSSFCSMSRGNSHMAPDGDHDSVQPMSVTNNETEAAHNQAMDGSRKQIEKKKSPVEKNVSLSVLQQYFSGSLKDAAKSLGVCPTTLKRICRQHGIARWPSRKINKVNHSLKKIQTVLDSVQGVEGGLKFDPYKGGFMPGGSSNQEINAHKSSLFWKKCSGKFPDPASKDAVTVSPASGSKDSKPIAMDDGGLRQEPFRVSILESSRCDIAYHSPNTLGEHHNPTTSSMSDSSNGSGSRKFEWLSEI

SEQ ID NO: 279 - protein, 769 aa, Arachis ipaensis
MTKDCGNYNAIETSLGFDEKAVLQQLETQLGLSEDANDMNNINGSLQELSAADMGNCLVPRPFAWSLDEKMLRAMNLFKESVGDGILTQVWAPMKHGNDFILSTSEQPYLLDHMLAGYRDVSREFTFSAEDKPGSFPGLPGRVFMSQIPEWTSNVGYYNKSEYLRVEHAINHEVRGSIAVPIIDTLAEPPCCAVLELVTTKEKPDFDKELEIVSSALQLVNLRTTTSPRLMSQCLSNNKRAALTEIIDVLRAVCHAHSLPLALTWIPCYYSEGIGDEASRIRIKDGGKIPGEKTVLCIEESACYINDIVVGGFVHACVEHYLEEGQGVAGKALQLNRPFFYSDVKAYNISEYPLVHHARKYKLNAAVAVRLRSIHTNDDDYMIEFFLPVNMNGSQEQQLLLDNLSGTMQRMCQSLRTVSDAKLYGIEGSQVQFSKEEGSHMAPDGDHDSVQPMSVTNNETEAAHNQAMDGSRKQIEKKKSPVEKNVSLSVLQQYFSGSLKDAAKSLGVCPTTLKRICRQHGIARWPSRKINKVNHSLKKIQTVLDSVQGVEGGLKFDPYKGGFMPGGSSNQEINAHKSSLFWKKCSGKFPDPASKDAVTVSPASGSKDSKPIAMDDGGLRQEPFRVSILESSRCDIAYHSPNTLGEHHNPTTSSMSDSSNGSGSRKFENRKHLKAKSPCLDKGSKIIVKAAYKEDMIRFKFDPAAGCLQLYEQVATRFKLQIGSFQLKYLDDEEKWVMMVNDSDLEEFIEISDDLRTRAVKFLVSDLVV

SEQ ID NO: 280 - protein, 671 aa, Arachis ipaensis
MAKRAISMGDNHCFWKTSKFRAIHSSKPADISVTKLKSTKAFVYTALFYFAISETIEIICSNLLNAIYTHTCTSIYSGKSFDLFLQLVNLRTTTPPRLMSQCLSNNKRAALTEIIDVSRAVCRAHSLPLALTWIPCYYSEGIGDEASRIRIKDGCKIPGEKTVLCIEESACYINDIVVGGFVRACVEHYLEEGQGVAGKALQSNRPFFYSDVKAYNISEYPLVHHARKYKLNAAVAVRLRSIHTNDDDYIIEFFLPVIMNGSQEQQLLLDNLSDTMQRMCQSLRIVSDDELYGIEGSQVQFSKEEGSSFFSMSRGNSHMAPEGDHDSVQPMSLTNNETEAAHNQAMDGSRKQTEKKKSTVEKNVSLSVLQQYFSGSLKDAAKSLGVCPTTLKRICRQHGIARWPSRKINKVNRSLKKIQTVLDSVQGVEGGLKFDPYKGGFIPGGSSNQEINAHKSSLFRKKCSGKYPDPASKDAVTVSPASGSKDSKPIGMDDGGLRQEPFPVSILESSRCDIVYHSPNTLVADEMENYLNGADKLGEHHNPTTSSMSDSSNGSGSRKFENRKHLKAKSPCVDKGSKIIVKAAYKEDMIRFKFDPAAGCLQLYEQVATRFKLQIGSFQLKYLDDEEEWVRMVNDSDLEECIEILDDLGTRAVKFLVSDMPSGLSSSGSNS

SEQ ID NO: 281 - protein, 585 aa, Arachis ipaensis
MSQCLSNNKRAALTEIIDVLRAVCRAHSLPLALTWIPCYYSEGIGDEASRIRTKDGRKIPGEKTVLCIEESACYTNDIVVGGFVRACVEHYLEEGQGVAGKALQSNRPFFYPDVKAYNISEYPLVHHARKYKLNAAVAIRLRSIHTNDDDYIIEFFLPVNMNGSEEQQLLLDNLAGTMQRKCQTLRKVSDAELHGIEGSSFCSMSRGNSHMAPDGDHDSVQPMSVTNNETEAAHNQAMEGSRKQIEKKRSPVKKNFSLSVLQQYFSGNLKDAAKSLGVCPTTLKRICRQHGIARWPSRKINKVNRSLKKIQTVLDSGVEGGLKFDPYKGGFMSGGSSNQEINAHKSSLFRKKCSVKYPDPASGSKGENLAVNQLLHSDILISNSKGELKKNKAFSVDVDSKPIAMGDGGLRQEPFPVSILESSRCDVAYHSPNSLVADEMETYLNGADKLGEHHNPTTSSMTDSSSGSCSILRPSSSGSPKFENRKHLKAKSPCVRRGSKIIVKAAYGENIIRFKFDPAAGCLQLYEEVATRFKLQIGSFQLEYLDDEDEWVRMVTDTDLEECIEMFDDLGTAVKFLVREPCSNS

SEQ ID NO: 282 - protein, 918 aa, Cajanus cajan
MEYPFSPKGGGIGDWQSSRAQLEGSTSLDGGMRNSISEDMPNSFSELMNFDTYAGLCDSPSITDQILANELPSFASLPYPLPDGFNLVQQNSGQCYMSRVGKNNNDMESSPMYGEKVGCQQMDTLLGFFSNSNDGNNLNSKLKTNGSSQHSNAFDTGNYIMSRPPGLSLDERMLRALSFFKESAGGGILAQVWVPIKHGDQFILSTSEQPYLLDQMLAGYREVSRTFTFSAEGKSGCFLGLPGRVFTSKVPEWTSDVGYYSMSEYLRFEHAINHKVRGSIAFPIFDMHSELPCCAVLELVTTKEKADFDKELEIVCRALQLVNLRTTKPLRLLPECLSNNKKATLTEIVDVLRSVCHAHRLPLALTWIPCYTEGSRGEATRIQIKEGHSTSSEKGILCIEESACYITDRAMTGFVRACMEHHLEEGKGVAGKALQSNHPFFYPDVKTYDISEYPLVHHARKYNLNAAVAIRLRSTYTNDDDYILEFFLPANMRGSSEQQLLLDNLSGTMQRICRSLRTVSDVELSGIGSSQVGFGKKNVPSFFPLSSRNSQIPLINGDRDSSQKMSLKATNLGNNEIEPSPSQERNGSKRQVQKNRSTLEKNVSLSVLQQYFSGSLKDAAKHIGVCPTTLKRICRQHGISRWPSRKINKVNRSLKKIQTVLNSVQGVEGGLKFDPSVGAFVAGGSIIQEIDAHKSLMFPEKNTIKDCAPDTLEAVSVPTAPCSEDENFSIKQQAFAPRCKIVLNKLVWVSRYLIGDEMDIGVDGDDGVVEPNHPTSSSLTDSSNGSGSMMHSNSSGSESFQNQNQSKVKSTIVDSGSILIVKATYGEDTIRFKFDPSAGCFRLYEEVATRFKLQNGSFQLKYLDDEEEWVMLVNDADLQECIEILDDIGTRSVRFLVRDMPCVLGSSGSSNGYLGGSL

SEQ ID NO: 283 - protein, 932 aa, Cajanus cajan
MEDHFPPKGKEIGYCTSPGVQLEESTSVDGGTKNSVSDDMFSYFSELMNFDTYAGWSNSPSLTDQSLANVFSSFSSPPDGLNLVEHSNGPFFMTEVGEIHNDMESSPSCEERVIFHQMDIQLGFLDDANNLDSKQNHNGTSQKINTSDMCNYIISRSSGRSLNDRMLRALSSFMESADAGMLAQVWLPIKHGDEFILSTSEQPYLLDPKLAGYREVSRAFTFSAEGKPGSCPGLPARVFISHVPEWTSNVGYYNKTEYLRLEHAMNHEIRGSIALPISDENSQVPCAVLELVTTKEKPNFDRELEIVTHALQFLKKYVIYIQQSDQHRTNDKCPCDDFMQLVNLRTTTPPRLLPQCLSSNKRSALTEIIDVLRAVCHAHRLPLALTWIPCCYREGTGDETERIRIKEGRTSSNEKCVLCIEESACYVNDGAVRGFVHACVEHHLVEGQGIAGKALQSNHPFFYTDVKTYDIVEYPLVHHARKYNLNAAVAIRLRSTYTNDDDYILEFFLPVNMTGSSEQQLLLDNLSGTMRRICRTLRTVSDAELTGIEGSQGGFPREKVSGIFPLSRRNSQITFINDDHDSVQKMSLKVSNLKNNGIEAAHSQEMNGSRKQIEKKRCTVEKNVSLSVLQQYFSGSLKDAAKSIGVCPTTLKRICRQHGISRWPSRKINKVNRSLKKIQTVLDSVQGVEGGLKFDPYTGGFIAGGSIMQETESHKYLLFPEKSSVKDPKPATQKKISVVSAPGSTSENSAIKLDGNDVGLVGNHLVHSRSVLISSTNRVEGADEHNHPTSSRTTDSSNGSGSIMHGSSSCSQSFENHKHSKVKSTCVDSGSKIIVKAGYRGDTIRFKFDPSAGCFKLYEEVATRFKLQNGSFQLKYLDDEEEWVMLVNDSDLQECTEIMDDIGTRCVKFLVRDVPCVLSSRDSNSCFLSDSS

SEQ ID NO: 284 - protein, 960 aa, Cajanus cajan
MEDHFPPKGKEIGYCTSPGVQLEESTSVDGGTKNSVSDDMFSYFSELMNFDTYAGWSNSPSLTDQSLANVFSSFSSPPDGLNLVEHSNGPFFMTEVGEIHNDMESSPSCEERVIFHQMDIQLGFLDDANNLDSKQNHNGTSQKINTSDMCNYIISRSSGRSLNDRMLRALSSFMESADAGMLAQVWLPIKHGDEFILSTSEQPYLLDPKLAGYREVSRAFTFSAEGKPGSCPGLPARVFISHVPEWTSNVGYYNKTEYLRLEHAMNHEIRGSIALPISDENSQVPCAVLELVTTKEKPNFDRELEIVTHALQLVNLRTTTPPRLLPQCLSSNKRSALTEIIDVLRAVCHAHRLPLALTWIPCCYREGTGDETERIRIKEGRTSSNEKCVLCIEESACYVNDGAVRGFVHACVEHHLVEGQGIAGKALQSNHPFFYTDVKTYDIVEYPLVHHARKYNLNAAVAIRLRSTYTNDDDYILEFFLPVNMTGSSEQQLLLDNLSGTMRRICRTLRTVSDAELTGIEGSQGGFPREKVSGIFPLSRRNSQITFINDDHDSVQKMSLKVSNLKNNGIEAAHSQEMNGSRKQIEKKRCTVEKNVSLSVLQQYFSGSLKDAAKSIGVCPTTLKRICRQHGISRWPSRKINKVNRSLKKIQTVLDSVQGVEGGLKFDPYTGGFIAGGSIMQETESHKYLLFPEKSSVKDPKPATQKKISVVSAPGSTSENSAIKLDGNDVGLVGNHLVHSRSVLISSTSEEELKKNNAYSDDSKSMAMNDDGSCKKACHWTNTQDCPEQTCSISLVSDEVEVGADRVEGADEHNHPTSSRTTDSSNGSGSIMHGSSSCSQSFENHKHSKVKSTCVDSGSKIIVKAGYRGDTIRFKFDPSAGCFKLYEEVATRFKLQNGSFQLKYLDDEEEWVMLVNDSDLQECTEIMDDIGTRCVKFLVRDVPCVLSSRDSNSCFLSDSS

SEQ ID NO: 285 - protein, 974 aa, Cajanus cajan
MEYPFSPKGGGIGDWQSSRAQLEGSTSLDGGMRNSISEDMPNSFSELMNFDTYAGLCDSPSITDQILANELPSFASLPYPLPDGFNLVQQNSGQCYMSRVGKNNNDMESSPMYGEKVGCQQMDTLLGFFSNSNDGNNLNSKLKTNGSSQHSNAFDTGNYIMSRPPGLSLDERMLRALSFFKESAGGGILAQVWVPIKHGDQFILSTSEQPYLLDQMLAGYREVSRTFTFSAEGKSGCFLGLPGRVFTSKVPEWTSDVGYYSMSEYLRFEHAINHKVRGSIAFPIFDMHSELPCCAVLELVTTKEKADFDKELEIVCRALQLVNLRTTKPLRLLPECLSNNKKATLTEIVDVLRSVCHAHRLPLALTWIPCYTEGSRGEATRIQIKEGHSTSSEKGILCIEESACYITDRAMTGFVRACMEHHLEEGKGVAGKALQSNHPFFYPDVKTYDISEYPLVHHARKYNLNAAVAIRLRSTYTNDDDYILEFFLPANMRGSSEQQLLLDNLSGTMQRICRSLRTVSDVELSGIGSSQVGFGKKNVPSFFPLSSRNSQIPLINGDRDSSQKMSLKATNLGNNEIEPSPSQERNGSKRQVQKNRSTLEKNVSLSVLQQYFSGSLKDAAKHIGVCPTTLKRICRQHGISRWPSRKINKVNRSLKKIQTVLNSVQGVEGGLKFDPSVGAFVAGGSIIQEIDAHKSLMFPEKNTIKDCAPDTLEAVSVPTAPCSEDENFSIKLEGKLKNAVDCSEDSKSMAMDDGSGQTASLCTKVQDCAEQACLGSFLAKERDERIPNKGGLRVEKFKHNIVGPSSRYLIGDEMDIGVDGDDGVVEPNHPTSSSLTDSSNGSGSMMHSNSSGSESFQNQNQSKVKSTIVDSGSILIVKATYGEDTIRFKFDPSAGCFRLYEEVATRFKLQNGSFQLKYLDDEEEWVMLVNDADLQECIEILDDIGTRSVRFLVRDMPCVLGSSGSSNGYLGGSL

SEQ ID NO: 286 - protein, 962 aa, Cannabis sativa
MEPFSPKEGDNDYWSSPSEQVESFPSFDGVPRDMLSEDVFNSFSELLSFDTYVGWSSNPAVTDQVSATYGLASLPPTIYTPQNTSDFIEQTVEALPVAEVGGNLDLPRGSFNYGDKAVFLPEDTQLEASAHSNNGSDLVATQNTDFLENGEMDVENSTVPRPVRLSLDEKMLKALSFVKASSGMGILAQVWVPVRRGDELLLSTSDQPYLLDNMLVGYREVSRRFTFSVEGKQGCVLGLPGRVFQSKIPEWTSNVAYYKKNEYVRVEHAYNHQVRGCIALPVCEPDLGVTCCAVLEIVTTNEKPNFDAEIEIVCNALQAVNLKMSQPLRLNPQCLSKNQKDALAEIIDVLRAVCHAHRLPLALTWIPCNSEGTSNEVAGVCVGDGKTSSTEKCILCVEKAACYVNDRLMQGFASACVEHHLEVGQGLAGKALQSNLPFFFPDVKTYDISDYPLVHHARKFGLNAAVAIRLRSTYTGDCDYILEFFLPVNMKGASEQQLLLNNLSGTMQRICKSLRTVSDVEIGIASHDTFKEDSVPNFIPLPGESSNMVQLDGDLNSTNEVPLKLAERRNEAHKVDNVHEQPRGTRWQAEKKRSTAEKNVSLSVLQQYFSGSLKDAAKSIGVCPTTLKRICRQHGISRWPSRKINKVNRSLKKIQTVLDSVQGVEGGLKFDPTTGGLVAAGSISQEYESQKKIASLQNLDPSFTVKLEEDECYTDGVNLNSYKIRKPNIIAPTNSNKDSKIAIEAGSKPISGTFSEKISLGSYPATEGMTSSHSKCSSKFENSDARHVSRNSSSLAVGDEMDTSEDGEDDELLQHNQPASSSMTDSSNGCGSLLHGSSSSSQSFEERKHPKGKASCADSYSKIIVKATYKEDTVRFKFDTSAGCYQLYEEVAKRFKLHTGAFQLKYLDDEEEWVMLVSDMDLQECLEILDDVGTRSVKFQVRDMPCVVGSSGSSNCFLPGGT

SEQ ID NO: 287 - protein, 941 aa, Cicer arietinum
MEYPFYHTGKGIGYWQSPGTQLEGSTSLDGGISNLVSEDMPSSFSELMNFDNYAGLCSGPSMTDQIMANELPALASVLYQSSDGLNIVEQNSGQFYMTEVGGNSNNPQSSPIYGEKIVCQQMDTLLGFLDNNDANNLSSKQKINGSLQHVNTFDTGNCVIPKPPALSLDERMLKALSFFKESAGGGILAQVWVPIKHGGQVFLSTSEQPYLLDQMLAGYREVSRTFTFSAEGKPGCLPGLPGRVFISKVPEWTSNVGYYNPSEYLRVEHARNHEVRGSIAFPIFDMHSGLPCCAVLELVTTKEKPNFDKELEIICRSLQLVNLRTNVPFRLLPECLSSNKRAALTEIVDVLRSVCHAHRLPLALTWIPCFYTKGTRDETTRIQIKEGNSSSREKNILCIEESACYITDRVMEGFVHACVEHHLEEGKGVAGKALQSNHPFFYPDVKAYDISEYPLVHHARKYSLNASVAIRLRSTYTYNDDYILEFFLPINMKGSSEQQLLLDSLSGTMQRICTSLRTVSEAELSGIKSLQVGFEKKNDPRFPPLSTQNSQIPSIKENNGSVQKLSLKASNQRKNGNEPSCNQETNGPRRRVEKNKSTSEKNVSLSVLQQYFSGSLKDAAKSIGVCPTTLKRICRHHGILRWPSRKINKVNRSLKKIQTVLDSVQGVEGGLKFDPSMGAFVAGGSTIQEIDEHESLFFPEKSTAQDPQNLENKLEGKLKETNSSSVDCSEDSKSMAMDDCHEQACFGSVLGKSDKLVLNKGGLRIEKCKHNNTSSFFVDEMDTCVDGDDEVVEHNNPTSSSLTDSSNGSGSMIHDISSGYEDFENQKHCKGKSTIVDGGSKIVVKATYGEDTIRFKFDPSTGCFRLYEEVAARFKLQNGTFRLKYLDDEEEWVMLVNDSDLQECLEILNDMGTRNARFLVRDVPCVLSSSGSSNCYLGGSS

SEQ ID NO: 288 - protein, 938 aa, Cicer arietinum
MEDQFSSTEKGIGFWTPLDVGMKSSTTSEDMFNNISELMNFDTYAGWCNGSSSVNDHDHSLVHEFSSFASIPYSPHDGLNLVEHINGPFFMTEIGGGNYNDMDNSTSYGGNYQLEFLDTNNSNETNNSDSQQGQNGSFQLLNSNNSSDMCNYLIPKSPSWSLDERMMSALSFFKESAGEGILAQVWVPVKYGDEFILTTSDQPYLLDQKLAGYREVSRLFTFSAEMKMGSCPGLPGRVFISHVPEWTSNVGYYHKSEYLRLEHAISHDVRGSIALPISDMLSEVSCSAVLELVTTKEKLNFDKELEFVSHALQRVNLRTIMPPRLLPQCVSINKRAALTEIIDVLRAVCHAHRLPLALTWIPCCYSEGKGEESERIRIKEGHTSSDEKCVLCIEESACYINDKMVGGFVHACADHHLEEGQGISGKALQSNHPFFYTDVKAYDVSEYPLVHHARKYSLNAAVAIRLRSTYTNDDDYVLEFFLPINMTGSSEQQLLLDNLSDTMRRICKSLRTVSEAELRGIQGSQDGFQKENVSGFFSLSRGNSQIAFTTGDQDLFQMSLNATNLKNIQGHCQATNAPRKQIEKKRSAVEKNVSLSVLQQYFSGSLKDAAKRIGVCPTTLKRICRQHGISRWPSRKINKVNRSLKKIQTVLDSVQGVEGVLKFDPHTGGFVAGGSIIQQIGSHKSLMFPENFFAQDLAPAPITTREPISVTPPPCENSAIKLEDGLKKENASSVDCIQDSTSITMHDEPCQTSWIWTKTQDCPKQTSIGSVFEKQDDQCGLNKTSSFSLIEHELGGDENNQPTSSSMTDSSNASGSMVRRSSSGSQQSFENRKRSKMKSVCVDSESKFAVKANYKGDTIRFKFDPSVGCFRLYEEVTTRFKLQNGSFTLKYLDDEEEWVMLVNDSDLKECVEILSDVGTHCVKLLVRDIHGSIVTSNS

SEQ ID NO: 289 - protein, 1007 aa, Citrus clementina
MEHPFSPKEKGTGYWASPRAPMEPLDCGTRNSNSGDLFNNFSDLLNFDAYAGWCNSPSVTDQMFASYGFSSFQSTPCASFDTSNVMASNSSVASEGGGTSNAMESSFDRGDRIGFQQTSTDCYPINTNDADDLVPKQSSGVYRENNTNMSNSMICRPVPPSLDEKMLRALSFFKLSSGGGILAQVWVPRKQGDDYILSTSDQPYLLDQMLAGYREVSRKFTFSAEAKPGTFLGLPGRVFSSKVPEWTSNVAYYNEAEYARVTHAVNHAVRSCIALPVFQFPEMSCSAVLEIVSVKEKPNFDAEIENICNALQAVNLRTTAPPRLLPQNISRNQKAALAEITDVLRAVCHAHRLPLALTWIPCNYDEEAVDEVIKVRVRHSNTSSDGKSVLCIEGTACYVNDSDMQGFVHACSEHYLEEGQGVAGKALQSNHPFFFPDVKLYDITEFPLVHHARKFGLNAAVAIRLRSTYTGDDDYILEFFLPVTIKGSSEQQLLLNNLSGTMQRMCRSLRTVSDAELIQDEGSKFGFQKEVVSNFPPMVMSRRNSQSALLDSDFNSIEKITLSVSNSKSGLEADGPPEQVMSGSRRHMEKKRSTAEKNVSLSVLQQYFSGSLKDAAKSIGVCPTTLKRICRQHGISRWPSRKINKVNRSLKKIQTVLNSVQGVEGGLKFDPTTGGFVAAGSIIQEFDAQKSSLHPDKNMPVRNSESITKDSTSIPPTLSIDGEKFVVKVEEDECSVDKNQVGPLSMLIQNSSKGELNKSSVNLIDCSEDSKLILTDAGPFWQARLGTAAWDSPDTASMVSYYAKGGEKGARSKNGLQLESSDCHFVSQSSNSLAAADNMDTRREGDDGIIENNQPTTSSTTDSSNGSGSLAHASSVSSPSFEEGKHLKIHPGSDDIGSKIIVKATYKEDIIRFKFDPSAGCFQLYEEVARRLKLQNGTFQLKYLDDEEEWVMLVSDSDLQECFDILESLGKRSVRFLVRDISCNVGSSGSSNCFLAGSSSCFLAGVS

SEQ ID NO: 290 - protein, 1012 aa, Citrus clementina
MEHPFSPKEKGTGYWASPRAPMEPLDCGTRNSNSGDLFNNFSDLLNFDAYAGWCNSPSVTDQMFASYGFSSFQSTPCASFDTSNVMASNSSVASEGGGTSNAMESSFDRGDRIGFQQTSTDCYPINTNDADDLVPKQSSGVYRENNTNMSNSMICRPVPPSLDEKMLRALSFFKLSSGGGILAQVWVPRKQGDDYILSTSDQPYLLDQMLAGYREVSRKFTFSAEAKPGTFLGLPGRVFSSKVPEWTSNVAYYNEAEYARVTHAVNHAVRSCIALPVFQFPEMSCSAVLEIVSVKEKPNFDAEIENICNALQAVNLRTTAPPRLLPQVSSELNISRNQKAALAEITDVLRAVCHAHRLPLALTWIPCNYDEEAVDEVIKVRVRHSNTSSDGKSVLCIEGTACYVNDSDMQGFVHACSEHYLEEGQGVAGKALQSNHPFFFPDVKLYDITEFPLVHHARKFGLNAAVAIRLRSTYTGDDDYILEFFLPVTIKGSSEQQLLLNNLSGTMQRMCRSLRTVSDAELIQDEGSKFGFQKEVVSNFPPMVMSRRNSQSALLDSDFNSIEKITLSVSNSKSGLEADGPPEQVMSGSRRHMEKKRSTAEKNVSLSVLQQYFSGSLKDAAKSIGVCPTTLKRICRQHGISRWPSRKINKVNRSLKKIQTVLNSVQGVEGGLKFDPTTGGFVAAGSIIQEFDAQKSSLHPDKNMPVRNSESITKDSTSIPPTLSIDGEKFVVKVEEDECSVDKNQVGPLSMLIQNSSKGELNKSSVNLIDCSEDSKLILTDAGPFWQARLGTAAWDSPDTASMVSYYAKGGEKGARSKNGLQLESSDCHFVSQSSNSLAAADNMDTRREGDDGIIENNQPTTSSTTDSSNGSGSLAHASSVSSPSFEEGKHLKIHPGSDDIGSKIIVKATYKEDIIRFKFDPSAGCFQLYEEVARRLKLQNGTFQLKYLDDEEEWVMLVSDSDLQECFDILESLGKRSVRFLVRDISCNVGSSGSSNCFLAGSSSCFLAGVS

SEQ ID NO: 291 - protein, 992 aa, Citrus clementina
MEHPFSPKEKGTGYWASPRAPMEPLDCGTRNSNSGDLFNNFSDLLNFDAYAGWCNSPSVTDQMFASYGFSSFQSTPCASFDTSNVMASNSSVASEGGGTSNAMESSFDRGDRIGFQQTSTDCYPINTNDADDLVPKQSSGVYRENNTNMSNSMICRPVPPSLDEKMLRALSFFKLSSGGGILAQVWVPRKQGDDYILSTSDQPYLLDQMLAGYREVSRKFTFSAEAKPGTFLGLPGRVFSSKVPEWTSNVAYYNEAEYARVTHAVNHAVRSCIALPVFQFPEMSCSAVLEIVSVKEKPNFDAEIENICNALQNISRNQKAALAEITDVLRAVCHAHRLPLALTWIPCNYDEEAVDEVIKVRVRHSNTSSDGKSVLCIEGTACYVNDSDMQGFVHACSEHYLEEGQGVAGKALQSNHPFFFPDVKLYDITEFPLVHHARKFGLNAAVAIRLRSTYTGDDDYILEFFLPVTIKGSSEQQLLLNNLSGTMQRMCRSLRTVSDAELIQDEGSKFGFQKEVVSNFPPMVMSRRNSQSALLDSDFNSIEKITLSVSNSKSGLEADGPPEQVMSGSRRHMEKKRSTAEKNVSLSVLQQYFSGSLKDAAKSIGVCPTTLKRICRQHGISRWPSRKINKVNRSLKKIQTVLNSVQGVEGGLKFDPTTGGFVAAGSIIQEFDAQKSSLHPDKNMPVRNSESITKDSTSIPPTLSIDGEKFVVKVEEDECSVDKNQVGPLSMLIQNSSKGELNKSSVNLIDCSEDSKLILTDAGPFWQARLGTAAWDSPDTASMVSYYAKGGEKGARSKNGLQLESSDCHFVSQSSNSLAAADNMDTRREGDDGIIENNQPTTSSTTDSSNGSGSLAHASSVSSPSFEEGKHLKIHPGSDDIGSKIIVKATYKEDIIRFKFDPSAGCFQLYEEVARRLKLQNGTFQLKYLDDEEEWVMLVSDSDLQECFDILESLGKRSVRFLVRDISCNVGSSGSSNCFLAGSSSCFLAGVS

SEQ ID NO: 292 - protein, 1010 aa, Citrus sinensis
MEHPFSPKEKGTGYWASPRAPMENLAPLDCGTRSSNSGDLFNNFSDLLNFDAYAGWCNSPSVTDQMFASYGFSSFQSTPCASFDTSNVMASNSSVASEGGGTSNAMESSFDRGDRIGFQQTSTDCYPIDTNDADDLVPKQSSGVYRENNTNMSNSMICRPVPPSLDEKMLRALSFFKLSSGGGILAQVWVPRKQGDDYILSTSDQPYLLDQMLAGYREVSRKFTFSAEAKPGTFLGLPGRVFSSKVPEWTSNVAYYNEAEYARVTHAVNHAVRSCIALPVFQFPEISCSAVLEIVSVKEKPNFDAEIENICNALQAVNLRTTAPPRLLPQNISRNQKAALAEITDVLRAVCHAHRLPLALTWIPCNYDEEAVDEVIKVRVRHSNTSSDGKSVLCIEGTACYVNDSDMQGFVHACSEHYLEEGQGVAGKALQSNHPFFFPDVKLYDITEFPLVHHARKFGLNAAVAIRLRSTYTGDDDYILEFFLPVTIKGSSEQQLLLNNLSGTMQRMCRSLRTVSDAELIQDEGSKFGFQKEVVSNFPPMVMSRRNSQSALSDSDFNSIEKITLSVSNSKSGLEADGPPEQVMSGSRRPMEKKRSTAEKNVSLSVLQQYFSGSLKDAAKSIGVCPTTLKRICRQHGISRWPSRKINKVNRSLKKIQTVLNSVQGVEGGLKFDPTTGGFVAAGSIIQEFDAQKSSLHPDKNMPVRNSESITKDSTSIPPTLSIDGEKFVVKVEEDECSVDKNQVGPLSMLIQNSSKGELNKSSVNLIDCSEDSKLILTDAGPFWQARLGTAAWDSPDTASMVSYYAKGGEKGARNKNGLQLESSDCHFVSQSSNSLAAADNMDTRREGDDGIIENNQPTTSSTTDSSNGSGSLVHASSVSSPSFEEGKHLKIHPGSDDIGSKIIVKATYKEDIIRFKFDPSAGCFQLYEEVARRLKLQNGTFQLKYLDDEEEWVMLVSDSDLQECFDILESLGKRSVRFLVRDISCNVGSSGSSNCFLAGSSSCFLAGVS

SEQ ID NO: 293 - protein, 1015 aa, Citrus sinensis
MEHPFSPKEKGTGYWASPRAPMENLAPLDCGTRSSNSGDLFNNFSDLLNFDAYAGWCNSPSVTDQMFASYGFSSFQSTPCASFDTSNVMASNSSVASEGGGTSNAMESSFDRGDRIGFQQTSTDCYPIDTNDADDLVPKQSSGVYRENNTNMSNSMICRPVPPSLDEKMLRALSFFKLSSGGGILAQVWVPRKQGDDYILSTSDQPYLLDQMLAGYREVSRKFTFSAEAKPGTFLGLPGRVFSSKVPEWTSNVAYYNEAEYARVTHAVNHAVRSCIALPVFQFPEISCSAVLEIVSVKEKPNFDAEIENICNALQAVNLRTTAPPRLLPQVSSELNISRNQKAALAEITDVLRAVCHAHRLPLALTWIPCNYDEEAVDEVIKVRVRHSNTSSDGKSVLCIEGTACYVNDSDMQGFVHACSEHYLEEGQGVAGKALQSNHPFFFPDVKLYDITEFPLVHHARKFGLNAAVAIRLRSTYTGDDDYILEFFLPVTIKGSSEQQLLLNNLSGTMQRMCRSLRTVSDAELIQDEGSKFGFQKEVVSNFPPMVMSRRNSQSALSDSDFNSIEKITLSVSNSKSGLEADGPPEQVMSGSRRPMEKKRSTAEKNVSLSVLQQYFSGSLKDAAKSIGVCPTTLKRICRQHGISRWPSRKINKVNRSLKKIQTVLNSVQGVEGGLKFDPTTGGFVAAGSIIQEFDAQKSSLHPDKNMPVRNSESITKDSTSIPPTLSIDGEKFVVKVEEDECSVDKNQVGPLSMLIQNSSKGELNKSSVNLIDCSEDSKLILTDAGPFWQARLGTAAWDSPDTASMVSYYAKGGEKGARNKNGLQLESSDCHFVSQSSNSLAAADNMDTRREGDDGIIENNQPTTSSTTDSSNGSGSLVHASSVSSPSFEEGKHLKIHPGSDDIGSKIIVKATYKEDIIRFKFDPSAGCFQLYEEVARRLKLQNGTFQLKYLDDEEEWVMLVSDSDLQECFDILESLGKRSVRFLVRDISCNVGSSGSSNCFLAGSSSCFLAGVS

SEQ ID NO: 294 - protein, 1010 aa, Citrus trifoliata
MEHPFSPKEKGTGYWASPRAPMENLAPLDCGIRSSNSEDLFNNFSDLLNFDAYAGWCNSPSVTDQMFASYGFSSFQSTPCASFDTSNVMASNSSVASEGGGTSNAMGSSFDCGDRIGFQQTSTDCYPIDTNDADDLVPKQSSGVYRENNSNMSNSMICRPVPLSLDEKMLRALSFFKLSSGGGILAQVWVPRKQGDDYILSTSDQPYLLDQMLAGYREVSRKFTFSAEAKPGTFLGLPGRVFSSKVPEWTSNVAYYNEAEYARVTHAVNHAVRSCIALPVFQFPDMSCSAVLEIVSVKEKPNFDAEIENICNALQAVDLRTAAPPRLLPQNISRNQKAALAEITDVLRAVCHAHRLPLALTWIPCNYDDEAVDEVIKVRVRHSNTSSDGKSVLCIEGTACYVNDSDMQGFVHACSEHYLEEGQGVAGKALQSNHPFFFPDVKLYNITEFPLVHHARKFGLNAAVAIRLRSTYTGDDDYILEFFLPVTIKGSSEQQLLLNNLSGTMQRMCRSLRTVSDAELIQDEGSKFGFQKEVVSNFPPMVMSRRNSQSALSDSDLNSIEKITLSVSNSKSGLEADGPSEQVMSGSRRHMEKKRSTAEKNVSLSVLQQYFSGSLKDAAKSIGVCPTTLKRICRQHGISRWPSRKINKVNRSLKKIQTVLNSVQGVEGGLKFDPTTGGFVAAGSIIQEFDAQKSSLHPDKNMPVRNSESITKDSTSIPPTLSIDGEKFVVKVEEDECSVDKNQVGPLSMLIQNSSKGELNKSSVDLIDCSEDSKLILTDAGPFRQARLGTAAWDSPDTASMVSYYAKGGEKGARNKNGLQLESPDCHFVSQSSNSLAAADNMDTRREGDDGIIENNQPTTSNTTDSSNGSGSLVHASSVSSPSFEEGKHLKIHPGFDDIGSKIIVKATYKEDIIRFKFDPSAGCFQLYEEVARRLKLQNGTFQLKYLDDEEEWVMLVSDSDLQECFDILESLGKRSVRFLVRDISCNVGSSGSSNCFLAGSSNCFLAGVS

SEQ ID NO: 295 - protein, 1012 aa, Citrus unshiu
MEHPFSPKEKGTGYWASPRAPMEPLDCGTRNSNSGDLFNNFSDLLNFDAYAGWCNSPSVTDQMFTSYGFSSFQSTPCASFDTSNVMASNSSVASEGGGTSNAMESSFDRGDRIGFQQTSTDCYPINTNDADDLVPKQSSGVYQENNTNMSNSMICRPVPPSLDEKMLRALSFFKLSSGGGILAQVWVPRKQGDDYILSTSDQPYLLDQMLAGYREVSRKFTFSAEAKPGTFLGLPGRVFSSKVPEWTSNVAYYNEAEYARVTHAVNHAVRSCIALPVFQFPEMSCSAVLEIVSVKEKPNFDAEIENICNALQAVNLRTTAPPRLLPQVSSELNISRNQKAALAEITDVLRAVCHAHRLPLALTWIPCNYDEEAVDEVIKVRVRHSNTSSDGKSVLCIEGTACYVNDSDMQGFVHACSEHYLEEGQGVAGKALQSNHPFFFPDVKLYDITEFPLVHHARKFGLNAAVAIRLRSTYTGDDDYILEFFLPVTIKGSSEQQLLLNNLSGTMQRMCRSLRTVSDAELIQDEGSKFGFQKEVVSNFPPMVMSRRNSQSALLDSDFNSIEKITLSVSNSKSGLEADGPSEQVMSGSRRHMEKKRSTAEKNVSLSVLQQYFSGSLKDAAKSIGVCPTTLKRICRQHGISRWPSRKINKVNRSLKKIQTVLNSVQGVEGGLKFDPTTGGFVAAGSIIQEFDAQKSSLHPDKNMPVRNSESITKDSTSIPPTLSIDGEKFVVKVEEDECSVDKNQVGPLSMLIQNSSKGELNKSSVNLIDCSEDSKLILTDAGPFWQARLGTAAWDSPDTASMVSYYAKGGEKGARSKNGLQLESSDCHFVSQSSNSLAAADNMDTRREGDDGIIENNQPTTSSTTDSSNGSGSLAHASSVSSPSFEEGKHLKIHPGSDDIGSKIIVKATYKEDIIRFKFDPSAGCFQLYEEVARRLKLQNGTFQLKYLDDEEEWVMLVSDSDLQECFDILESLGKRSVRFLVRDISCNVGSSGSSNCFLAGSSNCFLAGVS

SEQ ID NO: 296 - protein, 986 aa, Cucumis melo
MENPFSSKEEGMVSWGPSRTQTETLTSTDVGMRILSPEDVLHSFSELMSFDSYAGWGNNCATMDQIFTSCGFSSIPPMSTCPSMEGSTFPEGVSHEAFSLNEIDGTSISVANSFTCGDKVMFQQPDTEFGVSEVSDNTHEAGAKSNDVLLDNCLISRPIGWSLDERMLRALSFFKESSSGGILAQVWVPVKHGNHFFLSTSDQPYLLDQMLTGYREVSRSYTFSAEGKSGSLLGLPGRVFTSKIPEWTSNVRYYSDSEYLRMEHAIGHEVYGSIALPVFNNELEKSCCAVLEVVTTKEKSDFDAEIDIVSRALEIVSLRTVAPPRLYPQSLKQNQKSALAEIMDVLRAVCHAHRLPLALTWIPCCITLEAVDAAARVRVKENNVSPKEKSVLCIEETACYVNEKATQGFVHACMEHHLEEGQGIAGKALLSNDPYFYPDVKTYDINKYPLVHHARKFGLNAAVAIRLRSTYTGDDDYILEFFLPVNMKGSSEQQLLLNNLSGTMQRMCRSLRTVSKEELMGARDPNTGFQSGGLIGKSATTSRRNSQSTVTDSGTRVSNSVNDGTEAEFPKKQMTNGSRRQGEKKRSTAEKNVSLSVLQQYFSGSLKDAAKSIGVCPTTLKRICRQHGILRWPSRKINKVNRSLRKIQTVLDSVKGVEGGLKFDPTTGGLMAAGSLIPEFNGQNNLLFSDNNPSIRNLEPLLQDVSSVPPVSFNGQNSAMKLEIEDSFVTMSRRISSRDILIPEKEPNVCQLDCSEGSKSTGLDAASCQLADLDMMGWEVAGNATGSIIAKKGNRLDFVENDLRSSDADCQFMAKSSCSFAAADEMGTVMEGTDGINEHYQPTTSSMTDSSNGSGLLIHGSSSSCQSVEERKHLQEKISCVDSDSKIIVKASYKDDTVRFKFDPSLGYLQLYEEVGKRFKLNQGTFQLKYLDDEKEWVMLVSNSDLQECLEVMDEIGTRNVKFLVRDITSAVGSSSSSSCFLPRVS

SEQ ID NO: 297 - protein, 988 aa, Cucumis sativus
MENPFSTKEEGTMSWGPSRTQAETLTSTDVGMRIMSPEDVLHSFSELMSFDSYAGWGNNCSTMDQIFTSCGFSSIPPMSTCPSMEGSTFPEGMSVSHEAFSLNEIDGTSISVANSFTCGDKMMFQQPDTGFGVSEVSDNTNEAGSKSNDDLLDSCLISRPIGWSLDERMLRALSLFKESSPGGILAQVWVPVKHGNQFFLSTSDQPYLLDQMLTGYREVSRSYTFSAEGKLGSLLGLPGRVFTTKIPEWTSNVRYYSKNEYLRMEHAIGHEVYGSIALPVFSNELEKSCCAVLEVVTTKEKSDFDAEIDIVSRALEIVNLRTVAPPRLYPQCLKQNQKSALAEIMDVLRAVCHAHRLPLALTWIPCCITLEAVDDAARVRVKEKIISPKEKSVLCIEETACYVNDKATQGFVHACMEHHLEEGQGLAGKALLSNYPFFYPDVKTYDINKYPLVHHARKFGLNAAVAIRLRSTYTGDDDYILEFFLPVNMKGSSEQQLLLNNLSGTMQRMCRSLRTVSKEELMGAKDPDTGFQSGLIGKSATTSRRNSQSTVTDSETRVSNSVNNGTEAECPKKQMTNGLRRQGEKKRSTAEKNVSLSVLQQYFSGSLKDAAKSIGVCPTTLKRICRQHGILRWPSRKINKVNRSLRKIQTVLDSVKGVEGGLKFDPTTGGLMAAGSLIPELNGQNNLLFSDNNTSIRNLEPFLQDVNSVPPISFNGQNSAMKLEMEDSFVTMPQRISSRNILIPEKEPNVCQLDCSEGSKSTGLDAASCQLADLDMMGGWEVAGNATGSIIAKKSNRLDFVENDLRSSDADCQFMAKSSCSFAAADEMGTVLEGTDGINEHYQPTTSSMTDSSNGSGLLIHGSSSSCQSVEERKHLQEKISCVDSDSKIVVKASYKDDTVRFKFDPSLGYLQLYEEVGKRFKLNHGTFQLKYLDDEKEWVMLVSNSDLQECLEVMDEIGTRNVKFLVRDITSAVGSSGSSSCFLPRGS

SEQ ID NO: 298 - protein, 973 aa, Cucurbita maxima
MEKPFSSKEEGMMGYWGPSRTHAETMNSTDAGMRILSPEDVLPSFSDMMNFDSYAAIDQIFTSCGFSSIPQMSTCGSIEGLSFVEGGCHEGFPLNEHGGSSISMANSFTCGDKVMFHLPDTEFGVSNVSDNANKVDSKSNDVPVDMDSCLISRPFGWSLDEKMLRVLSMFKESSPGGILAQVWVPVKRRDQFFLSTSEQPYLLDQMLTGYREVSRSFTFSAEGKLGSLLGLPGRVFTSKLPEWTSNVRYYSDHEYLRMQHAIGHDVYGSIALPVFNNEVEKSCCAVLEVVTTKEKPNFDAEIDIVSQALETVSLSTVPPPRLYSQCLKKNQRAALAEIVDVLRAVCHAHRLPLALTWIPCCYSLDAVDEVARVRVKENNINPEEKFVLCIEETACYVNDKSTQGFVHACLEHHLEEGQGIAGKALQSNHPFFYPDVKAYDINKYPLVHHARKFGLNAAVAIRLRSMYTGNDDYILEFFLPVNMKGAAEQQLLLNNLSVTMQRMCRSLRTVSKEELIGAEDSVVDFQSGLIGKSTTTSMRNSQSTVTDRETRVSNSINNGAEAECPEKQMTDGSRKQGEKKRSTSEKNVSLSVLQQYFSGSLKDAAKSIGVCPTTLKRICRQHGILRWPSRKINKVNRSLRKIQTVLDSVKGVEGGLKFDPTTGCLMAGSLIPEFNAQNSLLFSDNNPAIPNLDPFLHDVNSVPSAPFNTQNSAIKLEMDESSVSISQRTSSRSVLIPEKEPNVRQRDCSEGLESAGVDAASCQLADLDMMSWDVQGNASVSIAAKKSDRLDFVKNDLRSGDADCQFMAKSLISFAAADEVGTVLNEHYQPTTSSMTDSSNGSGLMIHGSSSSSQSVERKHLPEKVGSVDSESKIIVKASYKDDTVRFKFDPCLGYLQLYEEVGMRFKLNQGTFQLKYLDDEKEWVMLVSNSDLQECLEVMDEIGTRNVKFLVREIACAVGSSGSSSCFLSGCS

SEQ ID NO: 299 - protein, 969 aa, Cucurbita maxima
MENPFPSKEEGMGYWGPSRTQADALTFTDAGMRIPSPEDVLHSISELMSFDSYAGWGNNCAVMDPVFTSCGISSIPPTSTCPSMEGSTFPEGGSHEILTLNELGGASISVVNSFTCGDEVMFQQPDTEFGVSDVSDNTNESGSNSNNVQDMDSCLISRPIGWSLDERMLRALSLFKESSPGGILAQVWVPMKHGNQFFLSTTDQPYLLDQMLTGYREVSRWYTFSAEGKLGSLLGLPGRVFNSKIPEWTSNVRYYSDAEYLRMEHAIGHEVYGSIALPIFSNELERSCCAVLEVVTTKEKPNFDAEIDIVSRALEIVSLRTIAPPRLYPQCLKQNQRSVLAEITDVLRAVCHAHRLPLALTWIPCCYTMQAVDEAARVRVKENDVSPKGKSVLCIEETACYVNDKATQGFVHACTEHHLEEGQGIVGKALQSNHPFFYPDVKAYNINEYPLVHHARKFGLNAAVAIRLRSTYTGADDYILEFFLPVNMKGSSEQQLLLNNLSGTMQRMCRSLRTVSKDELLGAKDPDAGFQSGMVGKSATTSRRNSQSTVTDSETRVSNSINDGTKAECPKKQQTTNGTRRQADKKRSTAEKNVSFSVLQQYFSGSLKDAAKSIGVCPTTLKRICRQHGILRWPSRKINKVNRSLGKIQTVLDSVKGVECRLKFDPTTGGLMAAGSLIPELNGQNSPLFSDNNPSIINLKPLPRDVNSVPSIPFDSQNPTVKLEMDDQRNSSRSVLIPEKEPSVCQLDCGEGSKSTGLDAASCQLSGLDVMDWDVPGNAAGCITAKKGNGLDFVENNLRSCSFGAANGVGTMWEGSDGMNEHYQPTTSSMTDSSNGSGLLIHGSSSSGQSVEERKHLQEKTSCVDSDSKIVVKASYKEDTVRFKFDPSLGYLQLYEEVGKRFKLNQGTFQLKYLDDEKEWVMLVSNSDMQECLEVMDEIGTRNVKFLVRDITCAVGSSGSSSCYLSGGS

SEQ ID NO: 300 - protein, 968 aa, Cucurbita maxima
MENPFPSKEEGMGYWGPSRTQADALTFTDAGMRIPSPEDVLHSISELMSFDSYAGWGNNCAVMDPVFTSCGISSIPPTSTCPSMEGSTFPEGGSHEILTLNELGGASISVVNSFTCGDEVMFQQPDTEFGVSDVSDNTNESGSNSNNVQDMDSCLISRPIGWSLDERMLRALSLFKESSPGGILAQVWVPMKHGNQFFLSTTDQPYLLDQMLTGYREVSRWYTFSAEGKLGSLLGLPGRVFNSKIPEWTSNVRYYSDAEYLRMEHAIGHEVYGSIALPIFSNELERSCCAVLEVVTTKEKPNFDAEIDIVSRALEIVSLRTIAPPRLYPQCLKQNQRSVLAEITDVLRAVCHAHRLPLALTWIPCCYTMQAVDEAARVRVKENDVSPKGKSVLCIEETACYVNDKATQGFVHACTEHHLEEGQGIVGKALQSNHPFFYPDVKAYNINEYPLVHHARKFGLNAAVAIRLRSTYTGADDYILEFFLPVNMKGSSEQQLLLNNLSGTMQRMCRSLRTVSKDELLGAKDPDAGFQSGMVGKSATTSRRNSQSTVTDSETRVSNSINDGTKAECPKKQTTNGTRRQADKKRSTAEKNVSFSVLQQYFSGSLKDAAKSIGVCPTTLKRICRQHGILRWPSRKINKVNRSLGKIQTVLDSVKGVECRLKFDPTTGGLMAAGSLIPELNGQNSPLFSDNNPSIINLKPLPRDVNSVPSIPFDSQNPTVKLEMDDQRNSSRSVLIPEKEPSVCQLDCGEGSKSTGLDAASCQLSGLDVMDWDVPGNAAGCITAKKGNGLDFVENNLRSCSFGAANGVGTMWEGSDGMNEHYQPTTSSMTDSSNGSGLLIHGSSSSGQSVEERKHLQEKTSCVDSDSKIVVKASYKEDTVRFKFDPSLGYLQLYEEVGKRFKLNQGTFQLKYLDDEKEWVMLVSNSDMQECLEVMDEIGTRNVKFLVRDITCAVGSSGSSSCYLSGGS

SEQ ID NO: 301 - protein, 923 aa, Cucurbita maxima
MATNLSISGWGNNCAVMDPVFTSCGISSIPPTSTCPSMEGSTFPEGGSHEILTLNELGGASISVVNSFTCGDEVMFQQPDTEFGVSDVSDNTNESGSNSNNVQDMDSCLISRPIGWSLDERMLRALSLFKESSPGGILAQVWVPMKHGNQFFLSTTDQPYLLDQMLTGYREVSRWYTFSAEGKLGSLLGLPGRVFNSKIPEWTSNVRYYSDAEYLRMEHAIGHEVYGSIALPIFSNELERSCCAVLEVVTTKEKPNFDAEIDIVSRALEIVSLRTIAPPRLYPQCLKQNQRSVLAEITDVLRAVCHAHRLPLALTWIPCCYTMQAVDEAARVRVKENDVSPKGKSVLCIEETACYVNDKATQGFVHACTEHHLEEGQGIVGKALQSNHPFFYPDVKAYNINEYPLVHHARKFGLNAAVAIRLRSTYTGADDYILEFFLPVNMKGSSEQQLLLNNLSGTMQRMCRSLRTVSKDELLGAKDPDAGFQSGMVGKSATTSRRNSQSTVTDSETRVSNSINDGTKAECPKKQQTTNGTRRQADKKRSTAEKNVSFSVLQQYFSGSLKDAAKSIGVCPTTLKRICRQHGILRWPSRKINKVNRSLGKIQTVLDSVKGVECRLKFDPTTGGLMAAGSLIPELNGQNSPLFSDNNPSIINLKPLPRDVNSVPSIPFDSQNPTVKLEMDDQRNSSRSVLIPEKEPSVCQLDCGEGSKSTGLDAASCQLSGLDVMDWDVPGNAAGCITAKKGNGLDFVENNLRSCSFGAANGVGTMWEGSDGMNEHYQPTTSSMTDSSNGSGLLIHGSSSSGQSVEERKHLQEKTSCVDSDSKIVVKASYKEDTVRFKFDPSLGYLQLYEEVGKRFKLNQGTFQLKYLDDEKEWVMLVSNSDMQECLEVMDEIGTRNVKFLVRDITCAVGSSGSSSCYLSGGS

SEQ ID NO: 302 - protein, 967 aa, Cucurbita moschata
MENPFSSKEEGMMGYWGPSRTQAETMNSTDAGMRILSPEDVLPTFSDMMNFDSYAAIDQIFTSCGFSSMPQMSTCGSIEGLSFVEGGCHEGFPLNEHGGASISMANSFTCGDKVMFQLPDTEFGVSSISDNANKVDSKSNDVPVDMDSCLISRPFGWSLDEKMLRVLSMFKESSPGGILAQVWVPVKHGDQFFLSTSEQPYLLDQMLTGYREVSRSFRFSAEGKLGSLLGLPGRVFTSKLPEWTSNVRYYSDHEYLRMQHAIGHDVYGSIALPVFNNEVEKSCCAVLEVVTTKEKPNFDAEIDIVSQALETVSLSTVPPPRLYSQCLKKNQRAALAEIVDVLRAVCHAHRLPLALTWIPCCYSFDAVDEVARVRVKENNINPEEKFVLCIEETACYVNDKSTQGFVHACLEHHLEEGQGIAGKALQSNHPFFYPDVKAYDINKYPLVHHARKFGLNAAVAIRLRSMYTGNDDYILEFFLPVNMKGAAEQQLLLNNLSVTMQRMCRSLRTVSKEELIGAEDSVVDFQSGFTSMRNSQSTVTDSETRVSNSINNGAEAECPEKQMTDGSRKQGEKKRSTSEKNVSLSVLQQYFSGSLKDAAKSIGVCPTTLKRICRQHGILRWPSRKINKVNRSLRKIQTVLDSVKGVEGGLKFDPTTGCLMAGSLIPELNAQNSLLFSDNNPAIPNLDPFLHDVNSVPSAPFNTQNSAIKLEMDESSVSISQRTSSRSVLIPEKEPNVRHRDCSEGLEAAGVDAASCQLADLDMVGWDVQGNASASIAAKKSDRLDFVKNDLRSGDADCQFMAKSSISFAAADEVGTVLNEHYQPTTSSMTDSSNGSGLMIHGSSSSSQSVERKHLPEKVGSVDSESKIIVKASYKDDTVRFKFDPCLGYLQLYEEVGTRFKLNQGTFQLKYLDDEKEWVMLVSNSDLQECLEVMDEIGTRNVKFLVRDIACAVGSSGSSSCFLSGCS

SEQ ID NO: 303 - protein, 969 aa, Cucurbita moschata
MENPFPSKEEGMGYWGPSRTQADALTFTDAGMRIPSPEDVLHSISELMSFDTYAGWGNNCAVMDPVFTSCGISSIPPTSTCPSMEGSTFPEGGSHEILPLNELGGASISMANSFTCGDEVTFQQPDTEFGVSDVSDNTNESGSNSNNVQDMDSCLISRPLGWSLDERMLRALSLFKESSPGGILAQVWVPMKHGNQFYLSTTDQPYLLDQMLTGYREVSRWYTFSAEGKLGSLLGLPGRVFNSKIPEWTSNVRYYSDAEYLRMEHAIGHEVYGSIALPIFSNELERSCCAVLEVVTTKEKPNFDAEIDIVSRALEIVSLRTIAPPRLYPQCLKQNQRSVLAEITDVLRAVCHAHRLPLALTWIPCCYTLQAVDEAARVRVKENDVSPKGKSVLCIEETACYVNDKATQGFVHACMEHHLEEGQGIVGKALQSNHPFFYPDVKAYNINEYPLVHHARKFGLNAAVAIRLRSTYTGADDYILEFFLPVNMKGSSEQQLLLNNLSGTMQRMCRSLRTVSKDELLGAKDPDAGFQSGMVGKSATTSRRNSQSTVTDSETRVSNSINDGTKAECPKKQQTTNGTRRQADKKRSTAEKNVSFSVLQQYFSGSLKDAAKSIGVCPTTLKRICRQHGILRWPSRKINKVNRSLGKIQTVLDSVKGVECRLKFDPTTGGLMAAGSLIPELNGQNSPLFSDNNPSIINLEPLPRDVNSVPPIPFDSQNPPVKLEMDDQRNSSRSLLIPEKEPSVCQLDCSEGSKSTGLDAASCQLSGLDVMDWDVPGNAAGSVTARKGNGLDFVENNLRSCSFGAANGVGTMWEGSDGMNEHYQPTTSSMTDSSNGSGLLIHGSSSSGQSVEERKHLQEKTSCVDSDSKIVVKASYKEDTVRFKFDPSLGYLQLYEEVGKRFKLNQGTFQLKYLDDEKEWVMLVSNSDMQECLEVMDEIGTRNVKFLVRDITCAVGSSGSSSCYLSGGS

SEQ ID NO: 304 - protein, 968 aa, Cucurbita moschata
MENPFPSKEEGMGYWGPSRTQADALTFTDAGMRIPSPEDVLHSISELMSFDTYAGWGNNCAVMDPVFTSCGISSIPPTSTCPSMEGSTFPEGGSHEILPLNELGGASISMANSFTCGDEVTFQQPDTEFGVSDVSDNTNESGSNSNNVQDMDSCLISRPLGWSLDERMLRALSLFKESSPGGILAQVWVPMKHGNQFYLSTTDQPYLLDQMLTGYREVSRWYTFSAEGKLGSLLGLPGRVFNSKIPEWTSNVRYYSDAEYLRMEHAIGHEVYGSIALPIFSNELERSCCAVLEVVTTKEKPNFDAEIDIVSRALEIVSLRTIAPPRLYPQCLKQNQRSVLAEITDVLRAVCHAHRLPLALTWIPCCYTLQAVDEAARVRVKENDVSPKGKSVLCIEETACYVNDKATQGFVHACMEHHLEEGQGIVGKALQSNHPFFYPDVKAYNINEYPLVHHARKFGLNAAVAIRLRSTYTGADDYILEFFLPVNMKGSSEQQLLLNNLSGTMQRMCRSLRTVSKDELLGAKDPDAGFQSGMVGKSATTSRRNSQSTVTDSETRVSNSINDGTKAECPKKQTTNGTRRQADKKRSTAEKNVSFSVLQQYFSGSLKDAAKSIGVCPTTLKRICRQHGILRWPSRKINKVNRSLGKIQTVLDSVKGVECRLKFDPTTGGLMAAGSLIPELNGQNSPLFSDNNPSIINLEPLPRDVNSVPPIPFDSQNPPVKLEMDDQRNSSRSLLIPEKEPSVCQLDCSEGSKSTGLDAASCQLSGLDVMDWDVPGNAAGSVTARKGNGLDFVENNLRSCSFGAANGVGTMWEGSDGMNEHYQPTTSSMTDSSNGSGLLIHGSSSSGQSVEERKHLQEKTSCVDSDSKIVVKASYKEDTVRFKFDPSLGYLQLYEEVGKRFKLNQGTFQLKYLDDEKEWVMLVSNSDMQECLEVMDEIGTRNVKFLVRDITCAVGSSGSSSCYLSGGS

SEQ ID NO: 305 - protein, 923 aa, Cucurbita moschata
MATNLSISGWGNNCAVMDPVFTSCGISSIPPTSTCPSMEGSTFPEGGSHEILPLNELGGASISMANSFTCGDEVTFQQPDTEFGVSDVSDNTNESGSNSNNVQDMDSCLISRPLGWSLDERMLRALSLFKESSPGGILAQVWVPMKHGNQFYLSTTDQPYLLDQMLTGYREVSRWYTFSAEGKLGSLLGLPGRVFNSKIPEWTSNVRYYSDAEYLRMEHAIGHEVYGSIALPIFSNELERSCCAVLEVVTTKEKPNFDAEIDIVSRALEIVSLRTIAPPRLYPQCLKQNQRSVLAEITDVLRAVCHAHRLPLALTWIPCCYTLQAVDEAARVRVKENDVSPKGKSVLCIEETACYVNDKATQGFVHACMEHHLEEGQGIVGKALQSNHPFFYPDVKAYNINEYPLVHHARKFGLNAAVAIRLRSTYTGADDYILEFFLPVNMKGSSEQQLLLNNLSGTMQRMCRSLRTVSKDELLGAKDPDAGFQSGMVGKSATTSRRNSQSTVTDSETRVSNSINDGTKAECPKKQQTTNGTRRQADKKRSTAEKNVSFSVLQQYFSGSLKDAAKSIGVCPTTLKRICRQHGILRWPSRKINKVNRSLGKIQTVLDSVKGVECRLKFDPTTGGLMAAGSLIPELNGQNSPLFSDNNPSIINLEPLPRDVNSVPPIPFDSQNPPVKLEMDDQRNSSRSLLIPEKEPSVCQLDCSEGSKSTGLDAASCQLSGLDVMDWDVPGNAAGSVTARKGNGLDFVENNLRSCSFGAANGVGTMWEGSDGMNEHYQPTTSSMTDSSNGSGLLIHGSSSSGQSVEERKHLQEKTSCVDSDSKIVVKASYKEDTVRFKFDPSLGYLQLYEEVGKRFKLNQGTFQLKYLDDEKEWVMLVSNSDMQECLEVMDEIGTRNVKFLVRDITCAVGSSGSSSCYLSGGS

SEQ ID NO: 306 - protein, 969 aa, Cucurbita pepo
  REGION 1..969: note = subsp. pepo
MENPFPSKEEGMGYWGPSRTQADALTFTDAGMRIPSPEDVLHSFSELMSFDSYAGWGNNCAVMDPVFTSCGISSIPPTSTCPSMEGSTFPEGGSHEILPLNELGGASISMANSFTCGDEVTFQQPDTEFGVSDVSDNTNESGSNSNNVQDMDSCLISRPISWSLDERMLRALSLFKESSPGGILAQVWVPMKHGNQFYLSTTDQPYLLDQMLTGYREVSRWYTFSAEGKLGSLLGLPGRVFNSKIPEWTSNVRYYSENEYLRMEHAIGHEVYGSIALPIFSNELERSCCAVLEVVTTKEKPNFDAEIDIVSRALEIVSLRTIAPPRLYPQCLKQNQRSVLAEITDVLRAVCHAHRLPLALTWIPCCYTLQAVDEAARVRVKENDVSPKGKSVLCIEETACYVNDKATQGFVHACMEHHLEEGQGIVGKALQSNHPFFYPDVKAYNINEYPLVHHARKFGLNAAVAIRLRSTYTGADDYILEFFLPVNMKGSSEQQLLLNNLSGTMQRMCRSLRTVSKDELLGAKDPDAGFQSGMAGKSATTSRRNSQSTVTDSETRVSNSINDGTKAECPKKQQTTNGTRRQADKKRSTAEKNVSFSVLQQYFSGSLKDAAKSIGVCPTTLKRICRQHGILRWPSRKINKVNRSLGKIQTVLDSVKGVECRLKFDPTTGGLMAAGSLIPELNGQNSPLFSDNNPSIINLEPLPRDVNSVPPIPFDSQNPAVKLEMDDQRNSSRSVLIPEKEPSVCQLDCGEGSKSTGLDAASCQLSGLDVMDWDVPGNAAGCITAKKGNGLDFVENNLRSCSFGAANGVGTMWEGSDGMNEHYQPTTSSMTDSSNSSGLLIHGSSSSGQSVEERKHLQEKTSCVDSDSKIVVKASYKEDTVRFKFDPSLGYLQLYEEVGKRFKLNQGTFQLKYLDDEKEWVMLVSNSDMQECLEVMDEIGTRNVKFLVRDITCAVGSSGSSSCYLSGGS

SEQ ID NO: 307 - protein, 968 aa, Cucurbita pepo
  REGION 1..968: note = subsp. pepo
MENPFPSKEEGMGYWGPSRTQADALTFTDAGMRIPSPEDVLHSFSELMSFDSYAGWGNNCAVMDPVFTSCGISSIPPTSTCPSMEGSTFPEGGSHEILPLNELGGASISMANSFTCGDEVTFQQPDTEFGVSDVSDNTNESGSNSNNVQDMDSCLISRPISWSLDERMLRALSLFKESSPGGILAQVWVPMKHGNQFYLSTTDQPYLLDQMLTGYREVSRWYTFSAEGKLGSLLGLPGRVFNSKIPEWTSNVRYYSENEYLRMEHAIGHEVYGSIALPIFSNELERSCCAVLEVVTTKEKPNFDAEIDIVSRALEIVSLRTIAPPRLYPQCLKQNQRSVLAEITDVLRAVCHAHRLPLALTWIPCCYTLQAVDEAARVRVKENDVSPKGKSVLCIEETACYVNDKATQGFVHACMEHHLEEGQGIVGKALQSNHPFFYPDVKAYNINEYPLVHHARKFGLNAAVAIRLRSTYTGADDYILEFFLPVNMKGSSEQQLLLNNLSGTMQRMCRSLRTVSKDELLGAKDPDAGFQSGMAGKSATTSRRNSQSTVTDSETRVSNSINDGTKAECPKKQTTNGTRRQADKKRSTAEKNVSFSVLQQYFSGSLKDAAKSIGVCPTTLKRICRQHGILRWPSRKINKVNRSLGKIQTVLDSVKGVECRLKFDPTTGGLMAAGSLIPELNGQNSPLFSDNNPSIINLEPLPRDVNSVPPIPFDSQNPAVKLEMDDQRNSSRSVLIPEKEPSVCQLDCGEGSKSTGLDAASCQLSGLDVMDWDVPGNAAGCITAKKGNGLDFVENNLRSCSFGAANGVGTMWEGSDGMNEHYQPTTSSMTDSSNSSGLLIHGSSSSGQSVEERKHLQEKTSCVDSDSKIVVKASYKEDTVRFKFDPSLGYLQLYEEVGKRFKLNQGTFQLKYLDDEKEWVMLVSNSDMQECLEVMDEIGTRNVKFLVRDITCAVGSSGSSSCYLSGGS

SEQ ID NO: 308 - protein, 923 aa, Cucurbita pepo
  REGION 1..923: note = subsp. pepo
MATNLSISGWGNNCAVMDPVFTSCGISSIPPTSTCPSMEGSTFPEGGSHEILPLNELGGASISMANSFTCGDEVTFQQPDTEFGVSDVSDNTNESGSNSNNVQDMDSCLISRPISWSLDERMLRALSLFKESSPGGILAQVWVPMKHGNQFYLSTTDQPYLLDQMLTGYREVSRWYTFSAEGKLGSLLGLPGRVFNSKIPEWTSNVRYYSENEYLRMEHAIGHEVYGSIALPIFSNELERSCCAVLEVVTTKEKPNFDAEIDIVSRALEIVSLRTIAPPRLYPQCLKQNQRSVLAEITDVLRAVCHAHRLPLALTWIPCCYTLQAVDEAARVRVKENDVSPKGKSVLCIEETACYVNDKATQGFVHACMEHHLEEGQGIVGKALQSNHPFFYPDVKAYNINEYPLVHHARKFGLNAAVAIRLRSTYTGADDYILEFFLPVNMKGSSEQQLLLNNLSGTMQRMCRSLRTVSKDELLGAKDPDAGFQSGMAGKSATTSRRNSQSTVTDSETRVSNSINDGTKAECPKKQQTTNGTRRQADKKRSTAEKNVSFSVLQQYFSGSLKDAAKSIGVCPTTLKRICRQHGILRWPSRKINKVNRSLGKIQTVLDSVKGVECRLKFDPTTGGLMAAGSLIPELNGQNSPLFSDNNPSIINLEPLPRDVNSVPPIPFDSQNPAVKLEMDDQRNSSRSVLIPEKEPSVCQLDCGEGSKSTGLDAASCQLSGLDVMDWDVPGNAAGCITAKKGNGLDFVENNLRSCSFGAANGVGTMWEGSDGMNEHYQPTTSSMTDSSNSSGLLIHGSSSSGQSVEERKHLQEKTSCVDSDSKIVVKASYKEDTVRFKFDPSLGYLQLYEEVGKRFKLNQGTFQLKYLDDEKEWVMLVSNSDMQECLEVMDEIGTRNVKFLVRDITCAVGSSGSSSCYLSGGS

SEQ ID NO: 309 - protein, 973 aa, Cucurbita pepo
  REGION 1..973: note = subsp. pepo
MENPFSSKEEGMMGYWGPSRTQAETMNSTDAGMRILSPEDVLPTFSDMMNFDSYAAIDQIFTSCGFSSMPQMSTCGSIEGLSFVEGGCHEGFPLNEHGGASISMANSFTCGDKAMFQLPDTEFGVSNVSDNANKVDSKSNDVPVDMDSCLISRPFGWSLDEKMLRVLSMFKESSPGGILAQVWVPVKHGDQFFLSTSEQPYLLDQMLTGYREVSRSFTFSAEGKLGSLLGLPGRVFTSKLPEWTSNVRYYSDHEYLRMQHAIGHDVYGSIALPVFNNEVEKSCCAVLEVVTTKEKPNFDAEIDIVSQALETVSLSTVPPPRLYSQCLKKNQRAALAEIVDVLRVVCHAHRLPLALTWIPCCYSFDAVDEVARVRVKENNINPEEKFVLCIEETACYVNDKSTQGFVHACLEHHLEEGQGIAGKALQSNHPFFYPDVKAYDINKYPLVHHARKFGLNAAVAIRLRSMYTGNDDYILEFFLPVNMKGAAEQQLLLNNLSVTMQRMCRSLRTVSKEELIGAEDSVVDFQSGLIGKSTTTSMRNSQSTVTDSETRVSNSINNGAEAECPEKQMTDGSWKQGEKKRSTSEKNVSLSVLQQYFSGSLKDAAKSIGVCPTTLKRICRQHGILRWPSRKINKVNRSLRKIQTVLDSVKGVEGGLKFDPTTGCLMAGSLIPELNAQNSLLFSDNNPAIPNLDLFLHDVNSVPSAPFNTQNSAIKLEMDESSVSISQRTSSRGVLIPEKEPNVRQHDCSEGLESAGVDAASCQLADLDMMSWDVQGNASVSIAAKKSDRLDFVKNDLRSGDADCQFMAKSSISFAAADEVGTVLNEHYQPTTSSMTDSSNGSGLMIHGSSSSSQSVERKHLPEKVGSVDSESKIIVKASYKDDTVRFKFDPCLGYLQLYEEVGMRFKLNQGTFQLKYLDDEKEWVMLVSNSDLQECLEVMDEIGTRNVRFLVRDIVCAVGSSGSSSCFLSGCS

SEQ ID NO: 310 - protein, 992 aa, Fragaria vesca
MEYQFSTRQGKDQGCSSSGGAAVEGLVGLDGEARNVISEDIFNNIAELMNFDTYAGWCSSPGTMEQIGVSYPSVSYAPLDALSFAQQNGGALAVAEDGGSSFDCCDKIGFQQMDTTQFGASTDFNHAHDAAAKLKNGFVQQNNIMDTADYVISRPHGWSLNEKMLKALSLFKESSGGGILAQVWVPMKHGDHSFLSTCEQPYLLDHVLAGYREVSRMFTFSAEEKQGSVLGLPGRVFVSKVPEWTSNVSYYNKAEYLRVEHAADHQVRGSIALPVFDMNSEMSCCAVLELVSTKDKLNFDAEMEIVCNALQAVKLRTTTPPRILPHCLSRNQRAALTEITDVLRAVCHAHTLPLALTWIPCCYSDGDGEGIRRVRVREGITNSNEKCILCVEETACYVNDRTMQGFVHACAEHHLEEGNGIAGKALQSNHPFFIHDVKVYDIYDYPLVHHARRYGLNAAVAIRLRSTYTGDDDYILEFFLPVNMKGSSEQQLLLNNLSGTMQRICKSLRTVSDAELTGVEGSDNGFQREAIPNTPSIPRRNSQSPSSDSEMKSAENIPSNVFNRKDGGVEVDFPPEHAPNGSRRQAEKKRSTAEKNVSLSVLQQYFSGSLKDAAKSIGVCPTTLKRICRQHGISRWPSRKINKVNRSLKKIQTVLDSVQGVEGGLKYDPTTGGFVATGSIIQEFDAQQNLFFPEKNLPAQNIVPVPQYPVSVPSMSCKDGERFEIKLEEDGCCMNGGTPIPTAHQEKEEVKKQNISVVDCSMNSKPIAIDFGSCQPTDHDTMPHNCPETDFGVSYLVKEVNRWGQSNDSLTLESSGCHFVPQSSSSFVVADEMDIGVDRDGGNVNYNQPTSSSMTDSSNSSGSMMHGCSSSSQSFEERKYQVKETNVEIGSKIIVKATYKEDTIRFKFEPSGGCLKLYEEVAKRLKLQDGTFQLKYLDDEQEWVMLVSDADLRECLEILDDIGTHSVKFMVRDIPFGVSSSGSSNCFLAGGS

SEQ ID NO: 311 - protein, 1004 aa, Glycine max
MMRLLGCWLTRTKPLVQSLIQRNSNIGQISTSIFLSNLIMEDHVSPEGKEVSCCTPPGAQLEEPTSVDGGMKKSASEDMFSNFSELMNFDTYAGWSNSPSMTDQSLANVFSSFSLAPYPVPDVLNLVEHGNGPFFMTEDSEIHNDMESAPSCGERIIFQQMDFQLGFLDEANDSNSLDSKQKPNGTSQEVNTTDMCNYIISSSPGRSLDDRMLRALSFFMESADGGMLAQVWVPIKHGDEFILSTSEQPYLLDPKLAGYREVSRAFTFSAEGKTQSCPGLPARVFISHVPEWTSNVGYYNKTEYLRLEHARNHEIRGSIALPISDVHSQVPCAVLELVTTKEKPNFDRELEIVSQALQLVNLRTTMPPRLHPQCLSSNKRAALTEIIDVLRAVCHAHRLPLALTWIPCCYSEGIRNETDRIRIKEGHTSPNEKCVLCIEESACYVNDGAVEGFVHACVEHHLEEGQGIAGKALQSNHPFFYTDVKTYDIGEYPLVHHARKYNLNAAVAIRLRSTYTNDDDYILEFFLPVNMTGSSEQELLLDNLSSTMRRICKSLRTVSDAELTGIEGSQGGFPKEKVSGFFPMSRRNSQIAFISDDHDSVLKMSLKASNMRNNGIEAVHSQTMNGSRKQVEKKRSTVENNVSLSVLQQYFSGSLKDAAKSIGVCPTTLKRICRQHGISRWPSRKINKVNRSLKKIQTVLDSVQGVEGGLKFDPYTGGFIAGGSIMQETEAHKYLVFPEKSSVKDPKPATQKKVSVAPAPASTIENSTIKLNDDEGVCLVGNKLVHSRSIPNSNSGEGELKKDNVSSDDSKSMTMNDGSCHKACHWKKTKDCPEQTCSMSLVTDEVEVGVDRVEGADEHNHPTSSSTTNSSNGSGSMMHGSSSCSHENQKYSKVKSNCVDSGSKMIVKASYRGDTIRFKFDPSSGCFQLYKEVATRFKLQNGSFQLKYLDDEEEWVMLVNDSDLQECTEILDDIGTRCVKFLVRDVPCVLSSHGSNSCFLSDSS

SEQ ID NO: 312 - protein, 965 aa, Glycine max
MEDHVSPEGKEVSCCTPPGAQLEEPTSVDGGMKKSASEDMFSNFSELMNFDTYAGWSNSPSMTDQSLANVFSSFSLAPYPVPDVLNLVEHGNGPFFMTEDSEIHNDMESAPSCGERIIFQQMDFQLGFLDEANDSNSLDSKQKPNGTSQEVNTTDMCNYIISSSPGRSLDDRMLRALSFFMESADGGMLAQVWVPIKHGDEFILSTSEQPYLLDPKLAGYREVSRAFTFSAEGKTQSCPGLPARVFISHVPEWTSNVGYYNKTEYLRLEHARNHEIRGSIALPISDVHSQVPCAVLELVTTKEKPNFDRELEIVSQALQLVNLRTTMPPRLHPQCLSSNKRAALTEIIDVLRAVCHAHRLPLALTWIPCCYSEGIRNETDRIRIKEGHTSPNEKCVLCIEESACYVNDGAVEGFVHACVEHHLEEGQGIAGKALQSNHPFFYTDVKTYDIGEYPLVHHARKYNLNAAVAIRLRSTYTNDDDYILEFFLPVNMTGSSEQELLLDNLSSTMRRICKSLRTVSDAELTGIEGSQGGFPKEKVSGFFPMSRRNSQIAFISDDHDSVLKMSLKASNMRNNGIEAVHSQTMNGSRKQVEKKRSTVENNVSLSVLQQYFSGSLKDAAKSIGVCPTTLKRICRQHGISRWPSRKINKVNRSLKKIQTVLDSVQGVEGGLKFDPYTGGFIAGGSIMQETEAHKYLVFPEKSSVKDPKPATQKKVSVAPAPASTIENSTIKLNDDEGVCLVGNKLVHSRSIPNSNSGEGELKKDNVSSDDSKSMTMNDGSCHKACHWKKTKDCPEQTCSMSLVTDEVEVGVDRVEGADEHNHPTSSSTTNSSNGSGSMMHGSSSCSHENQKYSKVKSNCVDSGSKMIVKASYRGDTIRFKFDPSSGCFQLYKEVATRFKLQNGSFQLKYLDDEEEWVMLVNDSDLQECTEILDDIGTRCVKFLVRDVPCVLSSHGSNSCFLSDSS

SEQ ID NO: 313 - protein, 973 aa, Glycine max
MEYPFSPKESVIGDWQSSGAQLEGSASLDGRMSNSIPEDMPNSFSELMNFDTYAGLCNSPSITDQILANDLPSFASLSYPLPDGFNLVQQYSGQYCMSGVGRNNNDMESSPIYGEKVVCQQMDTLLGCLNDTNEANNLNSKLKMNSSSQHLNNFDTGNYMMSRSPGLSLDERMLRALSFFKESAGGGILAQVWVPIKHGDQFILSTSDQPYLLDQMLAGYREVSRTFTFSTEGKSGCFLGLPGRVFTSKVPEWTSNVGYYSMSEYLRFEHAINHKVRGSIAIPIFDLHSEFPCCAVLELVTTKEKPDFDRELEIVRHALQLVNLRTVKTLRCLPQSLSNNKKATLTEIVDVLRSVCHAHRLPLALTWIPCGYTECSRGEASRIRIKGGHSTSSEKSVLCLEESACYITDRAMAGFIRACMEHHLEEGKGIAGKALQSNHPFFYPDVKTYDISEYPLVHHARKYNLNAAVAIRLRSTYTNDDDYILEFFLPVNMRGSSEQQLLLDNLSGTMQRICSSLRTVSETELSGIESSPVGLGKKNAPSFFPLSSRNSDIPLINGDCDSVQKMSLKATTNLKDNEIEPSPNQERNGSKRQVQKNRSTSEKNVSLSVLQQYFSGSLKDAAKKIGVCPTTLKRICRQHGIPRWPSRKINKVNRSLKKIQTVLDSVQGMEGGLKFDPSMGAFVAGGSIIQEIDAPKSTIKDPVPVTQDAFSVPPAPCSEGENFSIKLEGKLKKTNVSSVDYSEDSKSMAINDGSCQMASLCTKVQDCPEQACLGSVLAKEHDKRILNKGGLSVEKFKHNIVGQSSKSLIADEMDIGVDGDDGVVERNHPTSSSLTDSSNGSGSMMHSSSSGSRSFENQDQSKVKSTIIDCGSKLIVKATYREDTIRFKFDPSEGCFRLYEEVAARFKLQNGLFQLKYLDDEEEWVMLVNDADLQECIEILDDIGTRSVRFLVRDMPSVLSSSGSSNSYLGGSS

SEQ ID NO: 314 - protein, 971 aa, Glycine max
MEDHVSPEGKEVSCCAPPGAQLEESTSVDGGKKNSSSEDMFSNFSELMNFDTYAGWSNSPSMTDLSVANVFSLFSSAPYPPPDGLNLVEQSNGSFFMTEDSEFHNGMESSPSCVERVIFQQMDIHLGFLDEANDSNNLDSKEKLNGKSQQVNTSDMCNYIISRSPGRSLDDRMLRALSFFMESADEGMLAQVWVPTKHGDEFILSTSQQPYLLDPKLAGYREVSRAFTFSAEGKTRTCPGLPARVFISHVPEWTSNVGYYNKTEYLRLEHAKNHEIRGSIALPISDVHSQVPCAVLELVTTKEKANFDRELEIFSHALQLVNLRTSMPPRLLPQCLSSNKRVALTEIIDVLRAMCHAHRLPLALTWIPCCYSEGIRDETERIRIKEGHTSSNEKCVLCIEESACYVNDGGVGGFVHACIEHHLEEGQGIAGKALQSNHPFFYTDVKTYDIGEYPLVHHARKYNLNAAVAIRLRSTYTNGDDYILEFFLPVNMTGSSEQQLLLDNLSGTMRRICKSLRTVSDAELTGIDGSQGGFPKEKVSGFFPMSRRNSEIAFINGDHDSVQKMSMKTSNMRNNGTEAVHSQAMNGSRKQVEKKRSTVEKNVSLSVLQQYFSGSLKDAAKSIGVCPTTLKRICRQHGISRWPSRKINKVNRSLKKIQTVLDSVQGVEGGLKFDPYTGGFIAGGSIMQEIDAHKYLVFPKKSSVKDPKPATQKTVSVAPAPGSTRENSTIKLNDDESVCLVRNKFVHSRNVLNSNSSKGELKKDNVSSDDCCDDSKSMAMNDGSCQKSCLWTKTQDCPEQTCSISLVTDEVEVGVDRVEGADEHNHPTSSSTTHSSNGSGSMMHGSSSCSQSFEKQKHSKVKSNCVDSGSKMIVKASYRGDTIRFKFDPSSGCFQLYEEVATRFKLQNGSFQLKYLDDEEEWVMLVNDSDLQECTEILGDIGTRFVKFLVRDVPCVFRSRGSNSCFLSDSS

SEQ ID NO: 315 - protein, 981 aa, Glycine max
MEYPFSPKDRVIGDWQSSGAQLEGSASLDGRMINSISEDMPNSFSELMNFDTYAGLCYSPSITDQILANELPSFAPLSYPLPDGFNPVQLNSGQCCMSGVGRNNNDTENSSLYGEKVVCQQMDTLLGFLNDTNEANNLNSKLKINVSSQHLNNSDTGNYMMSRPPGLSLDERMLRALSFFKESAGGGILAQVWVPIKDGDQFILSTSEQPYLLDQMLAGYREVSRTFTFSAEGKSGCSLGLPGRVFTSKVPEWTSNVGYYSMSEYLRFEHAINHKVCGSIAFPIFDLHSELPCCAVLELVTTNEKPDFDRELEIVCRALQLVNLRTAKPLRCLPQCLSNNKKATLTEIVDVLRSVCHAHRLPLGLTWIPCCFTECSRGEASSIRIEGGHSTSRGKNILCLEESACYITDRAMGGFVRACMEHRLEEGKGIAGKALQSNHPFFYPDVKTYDISEYPLVHHARKYNLNAAVAIRLRSTYTNDDDYILEFFLPVNMKGSSEQQLLLDNLSGTMQRICSSLRTVSETELSGMESLAVGLGKKNAPSFFPLSSRNSEIPLINGDCDSVQKATNLRDNEIESSPNQERNGSKRQVQKNRSTSEKNVSLSVLQQYFSGSLKDAAKNIGVCPTTLKRICRQHGIPRWPSRKINKVNRSLKKIQTVLDSVQGVEGGLKVLDSVQGVEGVLKFDPSMGAFVAGGSIIQEIDAHKSTIKDPVPVAQDAFSVRPAPCSEGENFSIKLEGKLKKTNVSSVNYSEDSKSMAINDGSCQTASLCTKVQDCPEQACLGSVLAKEHDKRILNKGGLSVEKFKRNIVGQSSKTLIGDEMDIGVDGDDGVVERNHPTSSSLIDSSNGSGSMMHSSSSGSQSFKNQDQSKVKSTIVDSRSKLIVKATYREDTIRFKFDPCAGCFSLYEEVAARFKLQNGLFQLKYLDDEEEWVMLVNNADLQECIEILDDIGTRSVRFLVRDMPSVLGSSGSSNSYLGGSS

SEQ ID NO: 316 - protein, 938 aa, Glycine max
MEYPFSPKDRVIGDWQSSGAQLEGSASLDGRMINSISEDMPNSFSELMNFDTYAGLCYSPSITDQILANELPSFAPLSYPLPDGFNPVQLNSGQCCMSGVGRNNNDTENSSLYGNYMMSRPPGLSLDERMLRALSFFKESAGGGILAQVWVPIKDGDQFILSTSEQPYLLDQMLAGYREVSRTFTFSAEGKSGCSLGLPGRVFTSKVPEWTSNVGYYSMSEYLRFEHAINHKVCGSIAFPIFDLHSELPCCAVLELVTTNEKPDFDRELEIVCRALQLVNLRTAKPLRCLPQCLSNNKKATLTEIVDVLRSVCHAHRLPLGLTWIPCCFTECSRGEASSIRIEGGHSTSRGKNILCLEESACYITDRAMGGFVRACMEHRLEEGKGIAGKALQSNHPFFYPDVKTYDISEYPLVHHARKYNLNAAVAIRLRSTYTNDDDYILEFFLPVNMKGSSEQQLLLDNLSGTMQRICSSLRTVSETELSGMESLAVGLGKKNAPSFFPLSSRNSEIPLINGDCDSVQKATNLRDNEIESSPNQERNGSKRQVQKNRSTSEKNVSLSVLQQYFSGSLKDAAKNIGVCPTTLKRICRQHGIPRWPSRKINKVNRSLKKIQTVLDSVQGVEGGLKVLDSVQGVEGVLKFDPSMGAFVAGGSIIQEIDAHKSTIKDPVPVAQDAFSVRPAPCSEGENFSIKLEGKLKKTNVSSVNYSEDSKSMAINDGSCQTASLCTKVQDCPEQACLGSVLAKEHDKRILNKGGLSVEKFKRNIVGQSSKTLIGDEMDIGVDGDDGVVERNHPTSSSLIDSSNGSGSMMHSSSSGSQSFKNQDQSKVKSTIVDSRSKLIVKATYREDTIRFKFDPCAGCFSLYEEVAARFKLQNGLFQLKYLDDEEEWVMLVNNADLQECIEILDDIGTRSVRFLVRDMPSVLGSSGSSNSYLGGSS

SEQ ID NO: 317 - protein, 1000 aa, Glycine soja
MEDHVSPEGKEVSCCAPPGAQLEESTSVDGGKKNSSSEDMFSNFSELMNFDTYAGWSNSPSMTDLSVANVFSLFSSAPYPPPDGLNLVEQSNGSFFMTEDSEFHNGMESSPSCVERVIFQQMDIHLGFLDEANDSNNLDSKEKLNGKSQQVNTSDMCNYIISRSPGRSLDDRMLRALSFFMESADEGMLAQVWVPTKHGDEFILSTSQQPYLLDPKLAGYREVSRAFTFSAEGKTRTCPGLPARVFISHVPEWTSNVGYYNKTEYLRLEHAKNHEIRGSIALPISDVHSQVPCAVLELVTTKEKANFDRELEIFSHALQRLGYLSTKVIMEKFLPCTNDKCLYDDFKQLVNLRTSMPPRLLPQCLSSNKRVALTEIIDVLRAMCHAHRLPLALTWIPCCYSEGIRDETERIRIKEGHTSSNEKCVLCIEESACYVNDGGVGGFVHACIEHHLEEGQGIAGKALQSNHPFFYTDVKTYDIGEYPLVHHARKYNLNAAVAIRLRSTYTNGDDYILEFFLPVNMTGSSEQQLLLDNLSGTMRRICKSLRTVSDAELTGIDGSQGGFPKEKVSGFFPMSRRNSEIAFINGDHDSVQKMSMKTSNMRNNGTEAVHSQAMNGSRKQVEKKRSTVEKNVSLSVLQQYFSGSLKDAAKSIGVCPTTLKRICRQHGISRWPSRKINKVNRSLKKIQTVLDSVQGVEGGLKFDPYTGGFIAGGSIMQEIDAHKYLVFPKKSSVKDPKPATQKTVSVAPAPGSTRENSTIKLNDDESVCLVRNKFVHSRNVLNSNSSKGELKKDNVSSDDCCDDSKSMAMNDGSCQKSCLWTKTQDCPEQTCSISLVTDEVEVGVDRVEGADEHNHPTSSSTTHSSNGSGSMMHGSSSCSQSFEKQKHSKVKSNCVDSGSKMIVKASYRGDTIRFKFDPSSGCFQLYEEVATRFKLQNGSFQLKYLDDEEEWVMLVNDSDLQECTEILGDIGTRFVKFLVRDVPCVFRSRGSNSCFLSDSS

SEQ ID NO: 318 - protein, 1009 aa, Glycine soja
MEYPFSPKDRVIGDWQSSGAQLEGSASLDGRMSNSISEDMPNSFSELMNFDTYAGLCYSPSITDQILANELPSFAPLSYPLPDGFNPVQLNSGQCCMSGVGRNNNDTENSSLYGEKVVCQQMDTLLGFLNDTNEANNLNSKLKINVSSQHLNNSDTGNYMMSRPPGLSLDERMLRALSFFKESAGGGILAQVWVPIKDGDQFILSTSEQPYLLDQMLAGYREVSRTFTFSAEGKSGCSLGLPGRVFTSKVPEWTSNVGYYSMSEYLRFEHAINHKVCGSIAFPIFDLHSELPCCAVLELVTTNEKPDFDRELEIVCRALQACFYFSSVTSLSALFACLTTSHVESDVEGSNDKCIYHGFLQLVNLRTAKPLRCLPQCLSNNKKATLTEIVDVLRSVCHAHRLPLGLTWIPCCFTECSRGEASSIRIEGGHSTSRGKNILCLEESACYITDRAMGGFVRACMEHRLEEGKGIAGKALQSNHPFFYPDVKTYDISEYPLVHHARKYNLNAAVAIRLRSTYTNDDDYILEFFLPVNMKGSSEQQLLLDNLSGTMQRICSSLRTVSETELSGMESLAVGLGKKNAPSFFPLSSRNSAIPLINGDCDSVQKATNLRDNEIESSPNQERNGSKRQVQKNRSTSEKNVSLSVLQQYFSGSLKDAAKNIGVCPTTLKRICRQHGIPRWPSRKINKVNRSLKKIQTVLDSVQGVEGGLKFDPSMGAFVAGGSIIQEIDAHKSTIKDPVPVAQDAFSVRPAPCSEGENFSIKLEGKLKKTNVSSVNYSEDSKSMAINDGSCQTASLCTKVQDCPEQACLGSVLAKEHDKRILNKGGLSVEKFKRNIVGQSSKTLIGDEMDIGVDGDDGVVERNHPTSSSLIDSSNGSGSMMHSSSSGSQSFKNQDQSKVKSTIVDSRSKLIVKATYREDTIRFTFDPCAGCFSLYEEVAARFKLQNGLFQLKYLDDEEEWVMLVNNADLQECIEILDDIGTRSVRFLVRDMPSVLGSSGSSNSYLGGSS

SEQ ID NO: 319 - protein, 974 aa, Humulus lupulus
MEQPFSSKERENDYWSSSRAQVESLPSSDGVPRGMLPEDVFNSFSELLSFDTYVGWSNNPTVTDQVSATYGLSSFPSTIYTPQDGSDFIEQDVEARSVTEVGGNLNLPRSSFDYGEKVVFQPEDTQFEASAHSNNGSDSVAKQNNGFFQENSEIDMANSTIQRPARFSLDEKMLKALSFVKETSGGGILAQVWVPVRRGDQLILSTSEQPYLLDHMMVGYREVSRMYTFSAEGKPGCFPGLPGRVFQSKIPEWTSDVRYYKKNEYVRVEHAYDHHVRGCIALPVCEPDLRMTCCAVLEIVTTREKQNFDAEIEIVSNALQAVDLRMNQPPRLNPQCLSKNQKDALAEIIDVLRAVCHAHRLPLALTWIPCYGEGTSNEGAGVRVKEGKSSSSEKCILCVEKAACYVNDRLMQGFAHACVEHHLEVGQGLAGKALQSNLPFFFPDVKTYDISDYPLVHHARKFGLNAAVAIRLRSTYTGDCDYILEFFLPVNMKGASEQQLLLNNLSSTMQRICKSLRTVSDVEVGIISHDTFQEGSVPNFMSLPGDSSKMAQSDNDLNSANELPLKLSARKNEAHEADSVHEQPLQTTRGTRRQTEKKRSTAEKNVSLSVLQQYFSGSLKDAAKSIGVCPTTLKRICRQHGISRWPSRKINKVNRSLKKIQTVLDSVQGVEGGLKFDPTTGGLVAAGSISQEFESQKIPFFVEKTASLQNSDPTLTVKLEEDECCTDGINSNSYKIRNPNIITPTNSTKDSKIAIKAVSKPVSGAFSEKISLGSYHATEGMTSSHSKCSSKFENSDGHHVSWISGSLAVGNEMDTAEDGENAELVEHNQPASSSMTDSSNGRGSMLHGSSSSSQSFEEHKHPKGKTSCADSCSKIIVKATYREDTVRFKFDTSGGCYQLYEEVAKRFKLQTGTFQLKYLDDEEEWVMLVSDMDLQECLEILDDVGTQSVKFQVRDMPCVVGSSGSSNCFLAGGS

SEQ ID NO: 320 - protein, 984 aa, Jatropha curcas
MENPFSSNEKGISYFASPRAQADSMVPPDGGTRNSIPEDVFNNFSEFMNMDTYAGWCNSPSAADQMFSSYGFSSFQSTPCASFDALNIPEHNSSTFLVGGDAFNDAGTYYSCGDKMVIQQSTSQFVYPSDSVGADDSGAKQSDGAHRQRFISDMAEIAKPVGLSLDEKMLRALSMLKETAGGGILAQVWVPIRRGEQYILSTFEQPYLLDQALAGYREVSRTYTFSAEMKPDLPLGLPGRVFISKVPEWTSNVIYYSNTEYLRVKHALNHKVQGSIALPIFEPLDMSCCAVLELVTVKEKPDFDSEMENVCYALQAVNLRTTAPPRLLTQTLSRNQRAALAEITDVLRAVCYAHSLPLALTWIPCNYAEEAVDEIVKVRVKDGHSRSTGKSVLCIEGTACYVNDREMQGFVHACLEHYIEEGQGIAGKAVQSNHPFFFPDVKAYDITEYPLVHHARKYGLNAAVAIRLRSTYTGDDDYILEFFLPVNIKGSSEQQLLLNNLSSTMQRICKSLRTVSDAELERGGGSTVGFQKGTVPSFSPMLVSTRSCQPTDTVSHLNLADRITFDASSSKNDRMESDGTHEQMMDGPRRQPEKKRSTSEKNVSLSVLQQYFSGSLKDAAKSIGVCPTTLKRICRQHGISRWPSRKINKVNRSLRKIQTVLDSVQGVEGGLKFDPTTGGFVAAGSIIQDSDHQKSFAFHDKQLPAGNSESANEDAVSVPPAPCIDGDNSTVKVEEDEFCIDTSRGLMMKSSIPVIDYSEDSRSVATDAGICQEAGLGCRRWSCLENSSALAKGRKWGLNIVSMKLENSDTHITSRSSCSLAAAESDTKIEGDNGTVDHNQHTCSSMTDSSNGSGSIMHGSASSSPSFEGEKQSNVITGYEDSGQKITVKATYKEDTIRFKFDPFMGCFQLYEEVAKRFKLQNGTFQLKYLDDEREWVMLVSDSDLQECVEILDYIGAHTVKFLVRDTPLTMGSSGSSNCFLGGS

SEQ ID NO: 321 - protein, 1006 aa, Juglans regia
MDYPLFSKEKGTGFWASSKVQMENLLSFDGTRNLNSEENFTELMNFDTYAGWCNSPGAADQIFTSYGLSSSASMPHGASLDALNFTEQNTGAFPVNESHGNFNPMENSFNSGDKTMFQQMDTRYGFSMDSNDTNDVAAAQNTGSFQQNNALNIENYIIPRPFSWSVDEKMLRALSLFKESSGGGILAQVWVPMRLGDHYVLSTSEQPYLLDQMLAGYREVSRLFTFSAERGSDSFLGLPGRVFISKVPEWTSNVRYYNKIEYLRVDHAANHEVRGSIALPVFDSHSMSCCAVLELVTTKEKPNFDKEMEIVCNALRAVNLSTAAPPRLHPQCLSVNQRAALAEIIDVLRAVCHAHRLPLAQTWIPCCYTERAGKEITGVRVREGKTNSDEKYILCIEETACYVNDQMMEGFVHACLEHHLDEGQGIAGKALQSNHPFFFPDVKTYDISEYPLVHHARKFGLNAAVSIRLRSTYTGDADYILEFFLPVSMKGSLEQQLLLNNLSGTMQRICKSLRTVSDRELAGGEGSNVAFQMGAVQKFTPMTMSKRNSQATSSDSDVNSTKKLPEKIHQKVSDARNDGIEADSPHEQVLFARSGSRRQEKKRNTAEKNVSLNVLQQYFSGSLKDAAKSIGVCPTTLKRICRQHGISRWPSRKINKVNRSLRKIQTVLDSVQGVEGGLKFDPTTGEFVASGSTTQESDSQKGLLFQDTDMCVKNAMPATQNAVSVPSTPGVSSLIKPEVDDCSMGNQVGPSSELAINACEGELDKPSVSWLDCSEDSNIAAIDAVSCRLASLETAPPTSSENATLGSYLVDRGEKWGLKRGSLKLVDSDSHFAPRSSISLAAANEMHTGVGGDAGIVEHNQPTSSSLTDSSDGSLSMMHGSSSSSQSFEEQKHSKVKTSCVDGGSKITVKATYREDTIRFKFEPSAGFFQLYEEVAKRFKLQNGIFQLKYLDDEEEWVMLESDADLQECLEILDDIGTHNVKFLVRDVPCTISSSGSSNCFLNGGS

SEQ ID NO: 322 - protein, 1003 aa, Juglans regia
MDYPLFSKEKGTGFWASSKVQMENLLSFDGTRNLNSEENFTELMNFDTYAGWCNSPGAADQIFTSYGLSSSASMPHGASLDALNFTEQNTGAFPVNESHGNFNPMENSFNSGDKTMFQQMDTRYGFSMDSNDTNDVAAAQNTGSFQQNNALNIENYIIPRPFSWSVDEKMLRALSLFKESSGGGILAQVWVPMRLGDHYVLSTSEQPYLLDQMLAGYREVSRLFTFSAERGSDSFLGLPGRVFISKVPEWTSNVRYYNKIEYLRVDHAANHEVRGSIALPVFDSHSMSCCAVLELVTTKEKPNFDKEMEIVCNALRAVNLSTAAPPRLHPQCLSVNQRAALAEIIDVLRAVCHAHRLPLAQTWIPCCYTERAGKEITGVRVREGKTNSDEKYILCIEETACYVNDQMMEGFVHACLEHHLDEGQGIAGKALQSNHPFFFPDVKTYDISEYPLVHHARKFGLNAAVSIRLRSTYTGDADYILEFFLPVSMKGSLEQQLLLNNLSGTMQRICKSLRTVSDRELAGGEGSNVAFQMGAVQKFTPMTMSKRNSQATSSDSDVNSTKKLPEKIHQKVSDARNDGIEADSPHEQARSGSRRQEKKRNTAEKNVSLNVLQQYFSGSLKDAAKSIGVCPTTLKRICRQHGISRWPSRKINKVNRSLRKIQTVLDSVQGVEGGLKFDPTTGEFVASGSTTQESDSQKGLLFQDTDMCVKNAMPATQNAVSVPSTPGVSSLIKPEVDDCSMGNQVGPSSELAINACEGELDKPSVSWLDCSEDSNIAAIDAVSCRLASLETAPPTSSENATLGSYLVDRGEKWGLKRGSLKLVDSDSHFAPRSSISLAAANEMHTGVGGDAGIVEHNQPTSSSLTDSSDGSLSMMHGSSSSSQSFEEQKHSKVKTSCVDGGSKITVKATYREDTIRFKFEPSAGFFQLYEEVAKRFKLQNGIFQLKYLDDEEEWVMLESDADLQECLEILDDIGTHNVKFLVRDVPCTISSSGSSNCFLNGGS

SEQ ID NO: 323 - protein, 972 aa, Lotus japonicus
MEYPFSPKGGELGYWQSPSAQFGGSISSDNGISNSISDDMPNSFSELLNFDSYAGWFTGPSVTDQIFANELPSFASVSYPLSDGFNLAEQNSGQFFTTGVCGNSSNLESSSTHGERVVCQQMDTLLGFLDETNDANTLNSKQKINDTLQQFSTFEEGNYTISRPPGPSLDERMLRALSFFKESAGGGILAQVWVPLEHGGQVILSTSEQPYLLDQMLAGYREVSRTFKFPAEGKPGGFSGLPGRVFVSKVPEWTSNVGYYSKNEYLRVEHARNYKVRGTIAFPIFDTHSELPCCAVLELVTTKEMSDFDRELEVVCHALQLVNLRTTMPLRIFPECYSNNKRAALAEIVDVLKSVCHAHRLPLALTWIPCCYTEGPKGEAMRIQIKEGHSSSGEKVLLCIEESACYVTDRLMEGFVRACIEHPLEEGKGIAGKALQSNHPFFYPDVKEYDISEYPLVHHARKCNLSAAVAIRLRSTHTNDDDYILEFFLPVNMRGSSEQQLLLDNLSGTMQRICRSLRTVSDVESSRIESTHMGFENKNLPSFSPLSRENSQIPLINANQDSVQKSLKASRLRNKGSKPPYNQVSNGSRRQVEKNRGTAEKNVSLSVLQQHFSGSLKDAAKSIGVCPTTLKRICRHHGISRWPSRKINKVNSSLKKIQTVLDSVQGVESSLKFDPSVGAFVAGGSTIQGIDTHKSLLFPEKSTIRDPRPITQDAVSVPAVPCGESEKSAIKLEGKLKKTNASLVDCCEDSKSMAMDDRSSHSSSLWTKAQGSSEQASLGSDLAKRDKWVLNNDGLRVENLKCNTVGQSSGSFTDDEMGIDVDNDEVVELNHPTCSSLTGSSNGSSPMIHGSSSSSQSFENQSKGKSTTVDRGSKIIVKATYRKDIIRFKFDPSAGCFKLYEEVAARFKLQNGTFQLKYLDDEEEWVMLVSDSDLQECVDILDDIGTRSVRFLVRDLPCVSEAVSTEAAHSEL

SEQ ID NO: 324 - protein, 972 aa, Lotus japonicus
MEYPFSPKGGELGYWQSPSAQFGGSISSDNGISNSISDDMPNSFSELLNFDSYAGWFTGPSVTDQIFANELPSFASVSYPLSDGFNLAEQNSGQFFTTGVCGNSSNLESSSTHGERVVCQQMDTLLGFLDETNDANTLNSKQKINDTLQQFSTFEEGNYTISRPPGPSLDERMLRALSFFKESAGGGILAQVWVPLEHGGQVILSTSEQPYLLDQMLAGYREVSRTFKFPAEGKPGGFSGLPGRVFVSKVPEWTSNVGYYSKNEYLRVEHARNYKVRGTIAFPIFDTHSELPCCAVLELVTTKEMSDFDRELEVVCHALQLVNLRTTMPLRIFPECYSNNKRAALAEIVDVLKSVCHAHRLPLALTWIPCCYTEGPKGEAMRIQIKEGHSSSGEKVLLCIEESACYVTDRLMEGFVRACIEHPLEEGKGIAGKALQSNHPFFYPDVKEYDISEYPLVHHARKCNLSAAVAIRLRSTHTNDDDYILEFFLPVNMRGSSEQQLLLDNLSGTMQRICRSLRTVSDVESSRIESTHMGFENKNLPSFSPLSRENSQIPLINANQDSVQKSLKASRLRNKGSKPPYNQVSNGSRRQVEKNRGTAEKNVSLSVLQQHFSGSLKDAAKSIGVCPTTLKRICRHHGISRWPSRKINKVNSSLKKIQTVLDSVQGVEGSLKFDPSVGAFVAGGSTIQGIDTHKSLLFPEKSTIRDPRPITQDAVSVPAVPCGESEKSAIKLEGKLKKTNASLVDCCEDSKSMAMDDRSSHSSSLWTKAQGSSEQASLGSDLAKRDKWVLNNDGLRVENLKCNTVGQSSGSFTDDEMGIDVDNDEVVELNHPTCSSLTGSSNGSSPMIHGSSSSSQSFENQSKGKSTTVDRGSKIIVKATYRKDIIRFKFDPSAGCFKLYEEVAARFKLQNGTFQLKYLDDEEEWVMLVSDSDLQECVDILDDIGTRSVRFLVRDLPCVSEAVSTEAAHSEL

SEQ ID NO: 325 - protein, 985 aa, Lotus japonicus
MEDHLSPKGKGIGYSASFDGGMKNSASEDMFNNISELMNFDTYAGWCNSPSMTDPNLANGLTPFVSVPYPPPDGLNLVEQSSGPFFMTEATGNYNDMQSSPSYGDRVVLQQMENQFEFFDVLNDTNNLDAKQKQSVPFQQLNTSDMGNHIMSWSSSWSLDERMLKALSFFKESAGGGILAQVWVPVKHGDEFILSTSEQPYLLDHKLAGYREVSRTFTFSAEGKAGSCPGLPGRVFTSHVPEWTSNVGYYNKTEYSRLEHAINHEVRGSIALPISDPDSKVPCSAVLELVTTKEKSNFDRELEIVSQALQHVHLRTITPPRLLPQSLSNNKRAALSEIIDVLRAVCHAHRLPLALTWIPCCYSEGIGDETERIRIKEGHISSNEKCVLCIEESACYINDKMVGGFVHACTEHHLEEGQGIAGKALQSNHPFFYPDVKSYDISEYPLVHHARKYNLNAAVAIRLRSTYTNDDDYILEFFLPVNMTGSLEQQLLLDNLSGTMQRICKSLRTVSDAELTGIESSQVGFQKEKVQGIFPISGRNSQTASIGCDYDLDRKMYLKATNLRNNGIEAARSQAINGSRKQVEKKRSTVEKNVSLSVLQQYFSGSLKDAAKSIGVCPTTLKRICRQHGISRWPSRKINKVNRSLKKIQIVLDSVQGMEGGLKFDPCTGGFVAGGSIIQDISAHKSILFPERSAVKDTEPVVREVVSGVPPAPGSPGENSAIELEDDGVCSVGNQLVHSTSVLMSNSYEGELKIDNASSADGSEDSKSMAVDDVTKAQDCPEQNSLGSVLEKEGDQWSLNKYGMGVENSIHDIVCNTNSSISLIELSGDGGNGADEHNHPTSSSMTDSSNGSGSMTLGCSSGSQSFENQKKSKAKSACVVDSGSKMVVKATYRGDTIRFKFDPSAGCFQLYEEVATRFKLQNGSFQLRYLDDEEEWVMMVNDSDLQECVEILGDIGATCVKFLVRDTTGVLRSRSSNSCFLSESS

SEQ ID NO: 326 - protein, 933 aa, Lupinus angustifolius
MQYPYSPKGRGIGYQSCPRSQLEGSTSLDSRMSNSISESIPNSFSELLNIDAYFCNSPSMTDQILSNWLPSFASVPYPSPDRFNLMEHNCGQFYTTEVNGNCSATETLPSYGERAVFQQMDNLPSFSDDATNFNSKQKVNGSAQNHNKFDMGNYLISRPPGLSLDERMLRALSFFKASAGEGILAQVWVPIKHGDQFVLTTSEQPYLLDQMLSGYREVSRTFTFSVGKLGSIPGLPGRVFNSQVPEWTSNVGYYNKAEYLRVEHAINHEVRGSIAFPISDVDSELPCCAVLELVTTTEKPDFNSELELVCHALKLVNLRTTMPPRLISQCLSNNKRDALTEITDVLRSVCHAHRLPLALTWIPCSYTECTEVEATRIQIKEGHSSSSEKSILCIEESACYIADRAMEGFVQTCIQHHLEEGKGIAGKALQSNHPFFCPDVKAYDISEYPLVHHARKYNLNAAVAIKLRSTYTNDDDYILEFFLPVTVRGSLEQQLLLDNLSGTMQKMCRSLRTVSDAELSGTENSQTGYENKNVFSFSPMSRKKSQIPLVSGNHNSIQNMSLEASNLRNSEIEPSHNQEANESRRQVLKKRTTSEKNVSLSVLQQYFSGSLKDAAKSIGVCPTTLKRICRNNGISRWPSRKINKVNRSLKKIQTVLDSVQGVEGGLNFDPSKGEFVAHKSHLLPKKSTTKDPGPVTEVAVLVPPAPCSESDKSAFKFEITNVHVMGKQLVHSSYELKKANASSVDCSEDSKSMETEYDISLRAEKSERDIVGMDTGMDGDDGVVELNHPSCSSLTNSSNNSSSMIHSSSSASQSFENKEHSKIKSTVADSESKIVVKATYREDTVRFKFDPSSGCSQLYEEIGTRFKLQEGLFQLKYLDDEDEWVMLVNDSDLQECIDIMDDTGTRNVKFLVRDMPCVLSSSGSSSCYLGCSS

SEQ ID NO: 327 - protein, 990 aa, Lupinus angustifolius
MEDPFFLKGKEFGYWTSPQAQVEEGPPSLDGGTRSSISEDMLNNFSELINFDNYAGWCTSPLMNDQSLTNGLSSFASAPYPPLSGFNLVEQNNSPFFMTEDSGNSNTMENSSSYGEKVVFQPMDTQLGFSDYANDTSNLDSNQNFNGSFQQLNTLDVDNYITSKPSGLSLDERMLRALSFFKESAGEGILAQVWVPKKHGDELILTTSEQPYLLDQMLAGYREVSRTFTFSAERKPGSFPGLPGRVFLSQVPEWTSHIGYYNKSEYMRVEDAINHEVRGSIALPISDLQSELPCCAVLELVTTKEKQDFDRELEIVSHALQLVNLRTPMPPRVLPQCLSNNKRAALTEITDVLRAVCHAHKLPLALTWIPCCYSEGMRDGTGRVRIKEGHASSGEKCILCIEESACYINDRMVGGFVHACVEHYLEEGQGIAGKALQSNLPFFYPDVKVCDIGEYPLVHHARKYNLNAAVAIRLRSIYTNDDDYILEFFLPVDMTGSSEQQLLLDNLSGTMQRICRNLRTISDAELSGIEGPQVGFENEKVSGFFSLSRENSHSTMLNGAHDSVQKMSLKASNLRNNGIGAVHNQAMNRSRRQAEKKRSTVEKNVSLSVLQQYFSGSLKDAAKSIGVCPTTLKRICRQHGISRWPSRKINKVNRSLQKIQIVLDSVQGVEGGLKFDPSTGGFVAGGSIIQAIDAHKGLMFPEKWTVKDPESLTKGAVSVLPASRSEDESLVIKLEEEDVSLEGNQLLHSRSVLISNSCDGELKKDNAFSFDCNDYSKSVTVDNESYRTTCPWTKSQDCPDQINPGSFLEKDSGSLNKSSHDIECHNSSSLVADELEIGGAVEHNHPTLSSMTDSSSGSGSTMHGSSSSSQISENQKQSKRKSTCVDSESKIIVKATYREDTIRFKFDPSIGCSQLYAEVATRFKLQNGSFQLKYLDDEKEWVMLVNDSDLQECVEIMGDIDTRSVKFIVRDMPCVVSNHGSNNCLLAEPT

SEQ ID NO: 328 - protein, 985 aa, Lupinus angustifolius
MEDPFFLKGKEFGYWTSPQAQVEEGPPSLDGGTRSSISEDMLNNFSELINFDNYAGWCTSPLMNDQSLTNGLSSFASAPYPPLSGFNLVEQNNSPFFMTEDSGNSNTMENSSSYGEKVVFQPMDTQLGFSDYANDTSNLDSNQNFNGSFQQLNTLDVDNYITSKPSGLSLDERMLRALSFFKESAGEGILAQVWVPKKHGDELILTTSEQPYLLDQMLAGYREVSRTFTFSAERKPGSFPGLPGRVFLSQVPEWTSHIGYYNKSEYMRVEDAINHEVRGSIALPISDLQSELPCCAVLELVTTKEKQDFDRELEIVSHALQLVNLRTPMPPRVLPQCLSNNKRAALTEITDVLRAVCHAHKLPLALTWIPCCYSEGMRDGTGRVRIKEGHASSGEKCILCIEESACYINDRMVGGFVHACVEHYLEEGQGIAGKALQSNLPFFYPDVKVCDIGEYPLVHHARKYNLNAAVAIRLRSIYTNDDDYILEFFLPVDMTGSSEQQLLLDNLSGTMQRICRNLRTISDAELSGIEGPQVGFENEKVSGFFSLSRENSHSTMLNGAHDSVQKMSLKASNLRNNGIGAVHNQAMNRSRRQAEKKRSTVEKNVSLSVLQQYFSGSLKDAAKSIGVCPTTLKRICRQHGISRWPSRKINKVNRSLQKIQIVLDSVQGVEGGLKFDPSTGGFVAGGSIIQAIDAHKGLMFPEKWTVKDPESLTKGAVSVLPASRSEDESLVIKLEEEDVSLEGNQLLHSRSVLISNSCDGELKKDNAFSFDCNDYSKSVTVDNESYRTTCPWTKSQDCPDQINPGSFLEKDSGSLNKSSHDIECHNSSSLVADELEIGGAVEHNHPTLSSMTDSSSGSGSTMHGSSSSSQISENQKQSKRKSTCVDSESKIIVKATYREDTIRFKFDPSIGCSQLYAEVATRFKLQNGSFQLKYLDDEKEWVMLVNDSDLQECVEIMGDIDTRSVKFIVRDMPCVVSNHGSNNCL

SEQ ID NO: 329 - protein, 975 aa, Lupinus angustifolius
MEDPFFLKGKEFGYWTSPQAQVEEGPPSLDGGTRSSISEDMLNNFSELINFDNYAGWCTSPLMNDQSLTNGLSSFASAPYPPLSGFNLVEQNNSPFFMTEDSGNSNTMENSSSYGEKVVFQPMDTQLGFSDYANDTSNLDSNQNFNGSFQQLNTLDVDNYITSKPSGLSLDERMLRALSFFKESAGEGILAQVWVPKKHGDELILTTSEQPYLLDQMLAGYREVSRTFTFSAERKPGSFPGLPGRVFLSQVPEWTSHIGYYNKSEYMRVEDAINHEVRGSIALPISDLQSELPCCAVLELVTTKEKQDFDRELEIVSHALQCLSNNKRAALTEITDVLRAVCHAHKLPLALTWIPCCYSEGMRDGTGRVRIKEGHASSGEKCILCIEESACYINDRMVGGFVHACVEHYLEEGQGIAGKALQSNLPFFYPDVKVCDIGEYPLVHHARKYNLNAAVAIRLRSIYTNDDDYILEFFLPVDMTGSSEQQLLLDNLSGTMQRICRNLRTISDAELSGIEGPQVGFENEKVSGFFSLSRENSHSTMLNGAHDSVQKMSLKASNLRNNGIGAVHNQAMNRSRRQAEKKRSTVEKNVSLSVLQQYFSGSLKDAAKSIGVCPTTLKRICRQHGISRWPSRKINKVNRSLQKIQIVLDSVQGVEGGLKFDPSTGGFVAGGSIIQAIDAHKGLMFPEKWTVKDPESLTKGAVSVLPASRSEDESLVIKLEEEDVSLEGNQLLHSRSVLISNSCDGELKKDNAFSFDCNDYSKSVTVDNESYRTTCPWTKSQDCPDQINPGSFLEKDSGSLNKSSHDIECHNSSSLVADELEIGGAVEHNHPTLSSMTDSSSGSGSTMHGSSSSSQISENQKQSKRKSTCVDSESKIIVKATYREDTIRFKFDPSIGCSQLYAEVATRFKLQNGSFQLKYLDDEKEWVMLVNDSDLQECVEIMGDIDTRSVKFIVRDMPCVVSNHGSNNCLLAEPT

SEQ ID NO: 330-331 - skipped (2 entries)

SEQ ID NO: 332 - protein, 916 aa, Malus x domestica
ASFDGGTSPAATDQIAASLGVPSWPSVTYAPFYALNFVEPNGEQLPVTSGAGTFNVGENFSCGDKIVFDQMGTPQYGVSTDSNEANDSAIKLNNSSFQHNNPMDMESYMIYRPPGLSLNEKMLKALSMFKETSGGGILAQLWVPMKHGDQYLLSTCEQPYLLDHILAGYREVSRMFTFSTEEKQSSILGLPGRVFVSKIPEWTSNVIFYNKTEYLRVDYAANHQVRGSIALPIFDFDMEMSCCAVLELVSTKEKPNFDTEMEVVCGALQAVNLRTNAPLRLLPQCLSENQRAALTEISDVLRVVCHAHLLPLAMTWIPCCYSEGNGDEIKRVCAKGGITNSNEKCILCIEETACYVNDSRMQGFVRACAEHHLEEGEGIAGKALQSNHPFFINDVKVYDICEYPLVHHARKYGLNAAVAIRLRSTYTADDDYILEFFLPVNVKGSTEQQLLLNNLSGTMQKICKSLRTASDAELVGLEGTNTRFQKGLSPNVPQRHSRTTLSDSEMKSAKNVTFNVFNRKNGAIKRDNPPGKAPSGSRRQVEKKRTTTEKNVSLSVLQQYFSGSLKDAAKSIGVCPTTLKRICRQHGISRWPSRKISKVNRSLEKIQTVLDSVQGVDGGLKYDPTTGGFVATGSIIQEVDAPKNILFPEKNLYVENSEPVTQDLVSVSSLSINNGGSLTVKLEKDGSCVPTSHENEVKNQSIPLMPSKPIAIDFGSCDPTNRGTKGSYLAKEVNKWGYTQNSDCHFVSQSSGFLVATDEMDMGVHGNDGIVEYNQHSSSSLTDSSNDFGSIMQGHSSSSQSFEEQKHPQVETTTGENGSKIIVKATYIEDTIRFKFEPSLGCLQLYEEVAKRLKLQSGTFQLRYLDDEEEWVMLVCDADLQECLEILDDIGTRCVKFLVRDVAFGMDSSGSSNFLG

SEQ ID NO: 333 - protein, 980 aa, Manihot esculenta
MENLFSLKEKGKGYWTSPRAQADGMAPSDGGAKNSISEDIFNSFSEFMNFDTYAGWCTSPSATDQMFASYGSSSFQSTPYSTFDALSFAEQSCLTSLVGGNALNAAGTSYSSGDKMAVQQVNVYASDLMDADDLCAKERTGAQRQIEEMANCMISRPVGFSLDEKMLRALSLLRESADGGILAQVWVPMRRGDQYILTTFEQPYLLDQSLAGYREVSRTYTFSAEVTPDLPLGLPGRVFISRVPEWTSSVVYYSIAEYLRGQHARNHKVQGSIALPIFEPPDNVCCAVLELVTVKEKPNFDSEMENVRLALQAVNLRSTAPPQLLPQSLSRNQRAALAEITDVLRAVCHAHSLPLALTWIPCHYMEEAFDEVMKVRVREGNSRSSGKFVLCIERTACYVNDREMQGFVHACSEHYIEEGQGIAGKALQSNHPFFFSDVKAYDITKYPLVHHARKYGLNAAVAIRLRSTYTGDDDYILEFFLPVNMKGSSEQQLLLNNLSGTMQRICKSLRTVSDAELKGGEGSAVDFQKGAISSFPPLSVSITSSQTTSSEAVLNLTDKVPLDASSSKYDAMKSDGPHEQSFNASRRQPEKKRSTAEKNVSLGVLQQYFSGSLKDAAKSIGVCPTTLKRICRQHGISRWPSRKINKVNRSLKKIQTVLDSVQGVEGGLKFDPTTGGFVAAGSIVQEFDSQRIFLSPDKNLPARNSQSATEEAVSVPSVPCIDGSNSAVKVEEDEFCMDTCGEVLMKSSIPVIDCSEDSKSIATDAEICQKGRLGCGPWAAMDNASAFAKGTKGSLNSGSAKVDNSDTHFVSRSSCSLGAAEVLDTKEEGDDVMVEHNQPTCSSMTESSNGSGSMIHGSASSSPSFEEKHLKVKCDDGGSKISVKATYREDTVRFKFEPSAGCFQLYEEVAKRFKLQNGTFQLKYLDDEEEWVMLVTDSDLQECIEILDYVGKRSVKFLVRDSVFTMGSSGSSNCFLGGSS

SEQ ID NO: 334 - protein, 993 aa, Medicago truncatula
MEYPYYSKGGGIGYWQSPGTQFEGPTSLDGGINNLVSEDMPNSFSELMNFDTYAGLCSGPSTTDQIMTNELPSLASALYQLPDGFNPVEPNSGQFYGGNYNNFESSPIFGEKIVCQQMDTLLGFLDNSNDANNSSSRQKFDDPSQHVNAFDMGNYVIARPQALISRPPALSLDERMLKALSFFKESAGGGILAQVWVPIKHDGQVLLSTSEQPYLLDQMLAGYREVSRTFRFSTEGKPGCIPGLPGRVFISKVPEWTSNVGYYNPKEYLRAEHARNHEVRGSIAFPIFDLHSGLPCSAVLELVTTKEKLDFDRELEIICRSLQDLDVSIQRYHGEFCSLASKVSYVFVGDWSLVNLRTTASSRLLPECLSTNKRAALTEIVDVLRSVCYAHRLPLALTWIPCFYTDGTRDETTRIQIKEGNSSSREKNILCIEESACYITDRVMEGFVHACIEHPLEEGNGVAGKALQSNHPFFYSDVKTYDISEYPLVHHARKFNLGAAVAIRLRSIYTNNDDYILEFFLPINMKGSSEQQLLLDNLSGTMQKICKSLRTVSGAEISGMESSVVGFGKKNVPSFPSTSTRNSQVSLINEKDGSVQKLSLDTSNLRNNGNKPSCNQENNGSRRRVEKKRNTSEKNVSLSVLQQYFSGSLKDAAKSIGVCPTTLKRICRHHGISRWPSRKINKVNRSLKKIQTVLDSVQGVEGGLKFDPSSGAFVAGGTTTEEINENKSLLFPERSTTQDSEPMSQNAVSVPSEDENLENKWEGKLKETNTCSIDCSEDSKSFAMDDCPEQAYIGSVLAKCDEWVLNNGGLREEKRKHSTIGQRTSSFAVDEMDTGADGDDDDVVEHNHPTSSSLTDSSNGSGSMIHGSSSGYQNFKNQKPSKGKSTIVDSGSKIVVKATYGEDTIRFKFDPSTGYYKLYEEVAARFKLQDGSFQLKYLDDEEEWVMLVNDSDLQVCLEILNDMGTHNARFLVRDIPCTFGSSGSSSCYLGGSS

SEQ ID NO: 335 - protein, 912 aa, Medicago truncatula
MEGQYSSKERGGISLWTPFDSGMKSSLNSDDMFNNISELMNFDSYAGWCNGSSSITDQTLTNDLSSFAYDGLNLSEHINGPFFMTEIGGNYNVMDSYDEKVLLQEMETQLEFLDNNSNETNNNLDSQQNGSYDMCNYIISKSPSWSLDERMMSALSFFKESAGGGILAQVWAPIKYGDDFILTTSDQPYLLDQKLAGYREVSRSFTFSAEMKMGSCCAGLPGRVFNSHVPEWTSNVGYYHKSEYLRLDHAISHEVRGSIALPISDMNSEVSCCAVLELVTTKEKPNFDKELEFVSHALQRVNLRTIMPPRLLPQCVSSNKRAALTEITDVLRAVCHAHSLPLALTWIPCCYSEGKGEESERIRIKEGHITSSNEKCVLCIEESACYINDKMVGGFVHACSEHHLEEGQGISGKALQSNHPFFYTDVKAYDVSEYPLVHHARKYNLNAAVAIRLRSTYTNDDDYVLEFFLPINMIGSSEQQLLLDNLSDTMRRICKSLRTVSEAELRGMEGSQYEFQKENVSGFFPMSRGNSQIAFSSGDNDLFQMSFNETNLKNSGNQAAYSQATSGSRKQAEKKRSAVEKNVSLSVLQQYFSGSLKDAAKKIGVCPTTLKRICRQHGISRWPSRKINKVNRSLKKIQTVLDSVQGVEGVLKFDPHTGGFVAGGSIIQQIGKHNKTLKFPEKASVPKLEDEDVLVSNSCEVELEKDNAISVDCIEDSTTWLWTKTQDCPKQTTIDYVLEKEQDQCGLDNSSLHDIGSHSSFSMIELGFEEGKGADEHNNPTSSSMTDSSNASGSMVNGSSSGSQSIENQKHSKVKSICVDSESKFAVKANYRGDTIRFKFDPSVGCCQLYEEVAKRFKLQNGSFQLKYLDDEEEWVMLVNDSDLKECVEVLSDIGTHCVKLLVRNIHGGSDS

SEQ ID NO: 336 - protein, 964 aa, Medicago truncatula
MEYPYYSKGGGIGYWQSPGTQFEGPTSLDGGINNLVSEDMPNSFSELMNFDTYAGLCSGPSTTDQIMTNELPSLASALYQLPDGFNPVEPNSGQFYGGNYNNFESSPIFGEKIVCQQMDTLLGFLDNSNDANNSSSRQKFDDPSQHVNAFDMGNYVIARPQALISRPPALSLDERMLKALSFFKESAGGGILAQVWVPIKHDGQVLLSTSEQPYLLDQMLAGYREVSRTFRFSTEGKPGCIPGLPGRVFISKVPEWTSNVGYYNPKEYLRAEHARNHEVRGSIAFPIFDLHSGLPCSAVLELVTTKEKLDFDRELEIICRSLQLVNLRTTASSRLLPECLSTNKRAALTEIVDVLRSVCYAHRLPLALTWIPCFYTDGTRDETTRIQIKEGNSSSREKNILCIEESACYITDRVMEGFVHACIEHPLEEGNGVAGKALQSNHPFFYSDVKTYDISEYPLVHHARKFNLGAAVAIRLRSIYTNNDDYILEFFLPINMKGSSEQQLLLDNLSGTMQKICKSLRTVSGAEISGMESSVVGFGKKNVPSFPSTSTRNSQVSLINEKDGSVQKLSLDTSNLRNNGNKPSCNQENNGSRRRVEKKRNTSEKNVSLSVLQQYFSGSLKDAAKSIGVCPTTLKRICRHHGISRWPSRKINKVNRSLKKIQTVLDSVQGVEGGLKFDPSSGAFVAGGTTTEEINENKSLLFPERSTTQDSEPMSQNAVSVPSEDENLENKWEGKLKETNTCSIDCSEDSKSFAMDDCPEQAYIGSVLAKCDEWVLNNGGLREEKRKHSTIGQRTSSFAVDEMDTGADGDDDDVVEHNHPTSSSLTDSSNGSGSMIHGSSSGYQNFKNQKPSKGKSTIVDSGSKIVVKATYGEDTIRFKFDPSTGYYKLYEEVAARFKLQDGSFQLKYLDDEEEWVMLVNDSDLQVCLEILNDMGTHNARFLVRDIPCTFGSSGSSSCYLGGSS

SEQ ID NO: 337 - protein, 1287 aa, Mucuna pruriens
NASEHGSNVSSKFLHRGTLTLVKLQLILIFNLSMEYPFPPKGSGIGDWQSSRAQLEGSTSLDGGMSNSISEDVPNSFSELMNFDSYAALCNSPSLTDQILANELPSFASLSYPLPDGFNLVQENSEQCYMSGVGRNNNDMENSPIYGEKVVCQQMDTLLGFVNDTNDANNLNSKLKINVPSQNLNTSDTGNYTMSRQPGLLLDERMLRALSFFKESAGGGILAQVWVPIKHGDQLILSTTEQPYLLDEMLAGYREVSRTFTFSAEGESGCFLGLPGRVFTSKAPEWTSNVEYYSMSEYSRVKHAIYHKVRGSIAFPIFDLHSEMPCCGVLELVTTKEKPDFDRELEIVCRALQHVNLRTAKPLRSFPQCLSNNKKATLTEIVDVLRSVCHAHRLPLALTWIPCCYIEGLRGEATRIQIKEAHSTSSGKKILCIEESACYVTDRAMAGFVRACMEHHLEEGKGIAGRALQSNHPFFYPDVKAYDISEYPLVHHARKYNLNAAVAIRLRSTCTNDDDYILELFLPVNMRGSSEQQLLLDNLSGTMQRICRSLRTVSTAELSGIGSSQEGFGKKNVPGFFPLSSRNSQIPLINGDHDSVQKMSLKETNLRNNEIEPSPNQEKNGSKRQVQKNRSTSEKNVSLSVLQQYFSGSLKDAAKNIGVCPTTLKRICRQHGISRWPSRKINKVNRSLKKIQTVLDSVQGVEGGLKFDPSMGAFVAGGSIIQKVDAHKSLLFPEKSTIKDPALVTQDAFSVPPAPCGEGESFSIKLEGKLKKTNAFSVDGSEDSKSMSIDDGSFQTASLCPKVQDCPGLACLGSVLAKEQDKRILNKGGLSVEKFKHNIVGQSSSSLIGDEMDIGVDGDDGVVEPNHPTSSSLIDSSNGSGSMMHSSSSGSQSFENQNQSKVKSTIVDSGSKLIVKAIYREDTIRFKFDPSAGCFRLYEEVAARFKLQNGSFQLKYLDDEEEWVMLVNDADLQECIEILDDIGKRSVRFLVRDMPCVLSSSGTNSPPPKPWEQAGSSSGSAPFRPASAGNTSDVVEASGTAKPGEIVSSSDRNATVNRNSLGRPVPARPWEQNYGNSSYGGYGSTSALNYNSGYGSGMYGSYGGLGGGMYGGGGVYGNSMYRGGYGGLYGSSGMYGGGMYNSGFGGPMGGYGMGGGPYGEQDPNNPFGGPPSPPGIWISVLRVMQGVVNFFGRISILIDQNTQAFHLFMTALLQLFDRSGLLYGELARFALRLLGIRTKSKTVNPSGPNGQPLPGPHNSSGNVNYIEAPKAAPSAPWDNVWGNDANQ

SEQ ID NO: 338 - protein, 1296 aa, Mucuna pruriens
KPLVQIFIQRDSNIDQISTSNFFFNLIMEDHFSPNGKEIGYCTPSGDQLEESTSEDGGMKNSSSDDMFNNFSEIMNFDTYAGWSNSPSITDQSWANVLSSFSSAPYPLPDGLNLVEHSNGSFFMTEVSEIHNGMESSPSSGDRVIFQQMDIQLGFLDEANDASNFDSKHKLNGTSQQLNNTSDMCNYIISRSSGRSLDDRMLRALSFFMESADGGMLAQVWVPIKHGDEFILSTSEQPYLLDPKLAGYREVSRAFTFSAEGKPGSCPGLPARVFRSHVPEWTSNVGYYNKTEYLRLEHAMNHEIRGSIALPISDVHSQVPCAVLELVTTKEKANFDREFEIVSHALQVDFCFAVSSIYFNFLIYVTIEGTNDRCPYDDFMQLVNLRTAMPPRLLPQCLSSNKRAALTEIIDVLRAVCHAHRLPLALTWIPCCYSEGIGEETERIRIKEGHKSSNEKCVLCIEESACYVNDRAIGGFVHACLEHYLEEGQGIAGKALLSNHPFFYTDVKTYDIGEYPLVHHARKYNLNAAVAIRLRSTYTNDDDYIIEFFLPVNMTGSSEQQLLLDNLSGTMRRICRSLRTVSDAELTRIQGFQSEFPKENVPSFFPMSTRNSEIAFINDDHDLVQKMSLKASNMRNNGIEAAHSQAMNGSRKQVEKKRSTVEKNVSLSVLRQYFSGSLKDAAKSIGVCPTTLKRICRQHGISRWPSRKINKVNRSLKKIQIVLDSVQGVEGGLKFDPYTGGFIAGGSIIQETESHKYLLFPEKSSVKDPKPTTQKAASVVSAPGSTSDNSTIKLDDNDGVCLMGNPLVHPRSVLISNNTSEGELKKDNVSSDDCCEDSKSVAMNDASCKKACLWTKTQDCPEQTCSISLVTDEVEVEVGVHEGEGADEHNHPTSSSTTNSSNGFGSMMHGSSSCSQSFENQKHSRVTPSCVDSGSKIIVKASYRGDTIRFKFDPSAGCFQLYEEVATRFKLQNGSFQLKYLDDEEEWVMLVNDSDLQECTEILDDIGTRCVKFLVRDVPCVLSSRGSNTPPKPWEKAPTPASGAAPFKPPSAGSTSDVVEASGTARPGEIVSASDKIATVNRNALGKPLPTRPWEQNYGSSSFGGYSSTMNYNSGYGSYGGVGGGMYGGGMYGNNMYRGGYGGLYGSSGMYGGGMYNGGFGGPMGGYGMGGGPYGVEDPNNPYGAPPSPPGFWISVLRVMQGVVNFFGRISILVDQNTQAFHLFMTALLQLFDRSGVLYGELARFVLRLLGIRTKPKKINPPGPDGLPLPGPHNMEGTKAAPSGSWDNVWENDTKK

SEQ ID NO: 339 - protein, 936 aa, Oryza sativa
MDMPTPSNRAGCNGNTGGTMGPSDDPYGAAAMNLDCYSEIYSPSVADQLFSLLNDPAAHRMFAMWPSMGSSPCAAGTSEDMPLDAYSGLGEAVEEPSQIMSVNPTEAEKTGKSSGELGSDDGAHQGSSMVPRSVVGSSLADRMLMALSLFRESLGSGALAQVWMPVEQEGHVVLSTCEQPFLLDQVLAGYREVSRHFVFSAKEEPGLQPGLPGRVFISGVPEWTSSVLYYNRPEYLRMEHALHHEIRGSLAMPIYDPSKDSCCAVFELVTRKEKPDFSAEMDNVCNALQAVNLKATKGSSNQKFYTENQKFAFTEILDVLRAICHAHMLPLALTWVPTSNGIDGGYVVGKDGASFSQSGKTIIRIHESACYVNDGKMQGFLQACARRHLEKGQGIAGRALKSNLPFFSPDIREYSIEDYPLAHHARKFSLHAAVAIRLRSTYTGNDDYILEFFLPVSCKGSGEQQMLLNNLSSTMQRICKSLRTVYEAEVDNVNAGTAAVFRKNNESCLPTGHTESSSHGDQSITGASFEDTSLANKPGVMEPELAEQVQPSSIGHAEKKRSTAEKNISLDVLRKYFSGSLKDAAKSLGVCPTTLKRICRHHGISRWPSRKINKVNRSLKKIQTVINSVHGVDRSLQYDPATGSLVPVVSLPEKLTFPSCDGLPTPSVGKTVEENSDLKSEEGCSLPDGSQRQSCQLQISDVKKSNEDEFHIGSGNSDFYGANATAKSNSEVTQGPLCPTGAFSALHLKGTDCTNPSSSLRPSSESTRNQIVGRNSPSIQQEDLDMLDNHEAEDKDHMHPSTSGMTDSSSGSASSHPTFKQNTRSALKDAASPALTVKATYNGDTVRFKFLPSMGWYHLLEEIAKRFKLPTGAYQLKYKDDEDEWVILANDSDLQECVDVLDSIGSRIVKLQVRDLPCIVSSSGSSTCLQLAAHSS

SEQ ID NO: 340 - protein, 886 aa, Oryza sativa
MDMLMLSSALDGLDSYTDLVAGSSVADSIFSALTCFPPSQERLLHVSTPVGSNSRQDDSDVSITKEGTTTRRGDCAAGLASGEPVAAGIGSVPKPFDGVTLTERMLRALAMLKEASGGEAILVQVWMPVRNGEQHVLTTSDQPFLLDQKLTGYREVSRQFTFSAEEGPGLFPGLPGRVFMSGMPEWTSNVMYYHGSEYLRVDYARRHEVRGSLAMPVFNSSGGSCCAVLEVVMTREKDNFCLEMVNVSNALQSVQLSTVNAWRHSQSYSRDQKLALMEIFDVLQAVCQAHLLPLALAWIPVCSKRDVLVSVEYGANFGKRNKEVLCIEESACYVNDTRMRDFVQVCAEHPLEKGQGVAGNAYLSNNPFFSSDVKDYDMHAYPLVNHARKFGLHAAVAIRLQSTYTKNDDYVLEFFLPVLCKGGGEQQLLLDSISATMRRVCKSLRTVSDAELKEDVTRKPSNENRSGTRCPSPVNLIYSGREIDVSNETKTNTPLEYQIEGIDEQLSDTKSTNKLIKCSNASDGEKRRSSTEKSVSLSVLQQYFSGSLKDAAKSIGVCPTTLKRICRQHGISRWPSRKIKKVNRSLKKIQNVISSVHGVEGVLKYDPSTGCLVSSVSPSIEPVLMNVEHKGSDPLPIESELPHLNFEPDCDAYRREHAGQDVLHKLQNKQNGEINFDMDDGELFRNSHSTRTLSGAFCEDMPNGLYVAREMTCVAKTGTRTERLEHKPSSRDSFSAPQEYRMESETDKSNKNSKQSLPSSSSMTDCSTSSGETFKSIKSQSANESNKTVVVKASYKNDTIRFKLLPSMKYEQLLEEIAKRLKLSIGLFQLKYKDDEGDWVILASDADLQECLEILDTTRLRILKLQVQDVVCPIGSSSGSCSMLRP

SEQ ID NO: 341 - protein, 951 aa, Parasponia andersonii
MEHPFSSKEKENEYWSSSRAQVENLASFDGVPRGMLPEDVFNSFSELLTFDAYAGWSNSPAVTDQVSATYGLSSLPSTTYVPMDGSNFAEQNVGALPVTEVGGNFNLPRSSFNYGDKIVFQPVNSEMGMVDSTICRPTRYSLDERMLRALSFVKESSGGGILAQVWVPVKHGDQLFLSTSEQPYLLDHMLAGYREVSRMYTFAAEGKPGCFPGLPGRVFISKIPEWTSDVGYYKKNEYVRVEHAYNHQVRGSLALPVFESDPGMPCCAVLEIVTTKEKPNFDTEMEIVCHALQAVNLRTNPPPRLVHQCLSKNQKDALAEIIDILRAVCHAHRLPLALTWIPCCYGEGAAGELAGVHVREGKTSSSEKCILCIEKSACYVNDSLMQGFAHVCVEHHLEEGQGLAGKALQSNLPFFFPDVKTYDISEYPLVHHARKFGLNAAVAIRLRSTYTGDCDYILEFFLPVNMKGASEQQLLLNNLSGTMQRICKSLRTVSDVEVGAIPSDAFQKGSVPNFMSLPGESSQMVLSDSDLNPTDELPLKVSNRRNEGIEADGVHEQAIRGSRRQTEKKRSTAEKNVSLNVLQQYFSGSLKDAAKSIGVCPTTLKRICRQHGISRWPSRKINKVNRSLRKIQTVLDSVQGVEGGLKFDPTTGGLVAAGSIAQELDAKKSLFFIEKTSSLQNSDPMSAVKLEEDECCTGGVDPNSGEIRKPNIVSLTNSTKDSKIAIEAGSRLPICDARSGALSDKACLGSYHAKEGKTSCQSKCSSKFENSKYYHVSQSSGSLGVCDEMDTAGDGDDELIEHNLPASSSMTDSSNGCGSMLHVSSSSSHSQSFEERKHPKGKMSCGDSGSKIIVKATYREDTVRFKFDTSAGCSQLYEEVAKRFKLQTGTFQLKYLDDEEEWVMLVSDMDLQECLEILDDIGTQSVKFQVRDMPCAVGSSGSSNCFLAGGS

SEQ ID NO: 342 - protein, 951 aa, Parasponia rigida
MEHPFSSKEKENEYWSSSRAQVENLASFDGVPRGMLPEDVFNSFSELLTFDAYAGWSNSPAVTDQVSATYGLSSLPSTTYVPMDGSNFAEQNVGALPVTEVGGNFNLPRSSFHYGDKIVFQPVNSEMGMVDSTICRPTRYSLDERMLRALSFVKESSGGGILAQVWVPVKHGDQLFLSTSEQPYLLDHMLAGYREVSRMYTFAAEGKPGCFPGLPGRVFISKIPEWTSDVGYYKKNEYVRVEHAYNHQVRGSLALPVFESDPGMPCCAVLEIVTTKEKPNFDTEMEIVCHALQAVNLRTNPPPRLVHQCLSKNQKDALAEIIDILRAVCHAHRLPLALTWIPCCYGEGAAGELAGVHVREGKTSSSEKCILCIEKSACYVNDSLMQGFAHVCVEHHLEEGQGLAGKALQSNLPFFFPDVKTYDISEYPLVHHARKFGLNAAVAIRLRSTYTGDCDYILEFFLPVNMKGASEQQLLLNNLSGTMQRICKSLRTVSDVEVGAIPSDAFQKGSVPNFMSLPGESSQMVLSDSELNPTDELPLKVSNRRNEGIEADGVHEQAIRGSRRQTEKKRSTAEKNVSLNVLQQYFSGSLKDAAKSIGVCPTTLKRICRQHGISRWPSRKINKVNRSLRKIQTVLDSVQGVEGGLKFDPTTGGLVAAGSIAQELDAKKSLFFIEKTSSLQNSDPMSAVKLEEDECCTGGVDPNSGEIRKPNIVSLTNSTKDSKIAIEAGSRLPICDARSGALSDKACLGSYHAKEGKTSCQSKCSSKFENSKYYHVSQSSGSLGVCDEMDTAGDGDDELIEHNLPASSSMTDSSNGCGSMLHVSSSSSHSQSFEERKHPKGKMSCGDSGSKIIVKATYREDTVRFKFDTSAGCSQLYEEVAKRFKLQTGTFQLKYLDDEEEWVMLVSDMDLQECLEILDDIGTQSVKFQVRDMPCAVGSSGSSNCFLAGGS

SEQ ID NO: 343 - protein, 951 aa, Parasponia rugosa
MEHPFSSKEKENEYWSSSRAQVENLASFDGVPRGMLPEDVFNSFSELLTFDAYAGWSNSPAVTDQVSATYGLSSLLSTTYVPMDGSNFAEQNVGALPVTEVGGNFNLPRSSFNYGDKIVFQPVNSEMGMVDSTICRPTRYSLDERMLRALSFVKESSGGGILAQVWVPVKHGDQLFLSTSEQPYLLDHMLAGYREVSRMYTFAAEGKPGCFPGLPGRVFISKIPEWTSDVGYYKKNEYVRVEHAYNHQVRGSLALPVFESDPGMPCCAVLEIVTTKEKPNFDTEMEIVCHALQAVNLRTNPPPRLVHQCLSKNQKDALAEIIDILRAVCHAHRLPLALTWIPCCYGEGAAGELAGVHVREGKTSSSEKCILCIEKSACYVNDSLMQGFAHVCVEHHLEEGQGLAGKALQSNLPFFFPDVKTYDISEYPLVHHARKFGLNAAVAIRLRSTYTGDCDYILEFFLPVNMKGASEQQLLLNNLSGTMQRICKSLRTVSDVEVGAIPSDAFQKGSVPNFMSLPGESSQMVLSDSDLNPTDELPLKVSNRRNKGIEADGVHEQAIRGSRRQTEKKRSTAEKNVSLNVLQQYFSGSLKDAAKSIGVCPTTLKRICRQHGISRWPSRKINKVNRSLRKIQTVLDSVQGVEGGLKFDPTTGGLVAAGSIAQELDAKKSLSFIEKTSSLQNSDPMSAVKLEEDECCTGGVDPNSGEIRKPNLVSLTNSTKDSKIAIEAGSRLPICDARSGALSDKACLGSSHAKEGKTSCQSKCSSKFENSKYYHVSQSSGSLGVCDEMDTAGDGDDELIEHNLPASSSMTDSSNGCGSMLHVSSSSSHSQSFEERKHPKGKMSCGDSGSKIIVKATYREDTVRFKFDTSAGCSQLYEEVAKRFKLQTGTFKLKYLDDEEEWVMLVSDMDLQECLEILDDIGTQSVKFQVRDMPCAVGSSGSSNCFLAGGS

SEQ ID NO: 344 - protein, 968 aa, Phaseolus vulgaris
MEDHFCPKGNETGYCTSPGAQLEESTSVDGGMKKSASEDMFSNFSELMNFDTYAGWNNSSCMTYQSLANVFSSFSSASYPPSEGLNLVEHGNGPCFMTEVSEIHSGMESSPSCEERGIFQQMDIQLGFLDEANDSNSFDSKQNRNGTYQQLNTSDMCNYLISRSSGRPLDDRILRALSFFMESVDGEMLAQVWVPIKHGDEFILSTSEQPYLLDPKLAGYREVSRAFTFSAEGKKGSCPGLPARVFISHVPEWTSNVGYYNKTEYLRLDHALNHEIRGSIALPISDLHSLVPCAVLELVTTKEKPNFDRELEIVTHALQLVNLKTITPPRLLPQSLSSNKRAALTEILDVLRAVCHAHRLPLALTWIPCSYSEGLGDESERIQIKEGHTSSNEKCVLCIEESACYINDGALGGFVHACVEHHLEEGQGIAGKALQSNHPFFYTDVKTYDIGEYPLVHHARKYNLNAAVAIRLRSTYTNDDDYILEFFLPVTMTGSSEQQLLLDNLSGTMRRICRSLRTVSDAELTGIEGSVAEFPKEKATYFFPMSKRNSQIAFINDDHDSVQKMSLKASNNGIEAVHSQVVNGSRKQIEKKRSTVEKNVSLSVLQQYFSGSLKDAAKSIGVCPTTLKRICRQHGISRWPSRKINKVNRSLKKIQTVLDSVQGVEGGLKFDPYTGGLIAGGSIMQEIDTHKYILFPEKSAVKDPKHATQKPVSVVPAPGSTSENSTIKLDNDDGVCLVGNKLVHSRSVLISDTSEGGLKKDNASSDDCCEDSKSVAMNDGSSQKGSKRAKNQDCPDQTCSISLVTDEVEVGVDGGEGIDEHNHLNSSSTTHSSNGSGSMMHGSSSRSQSFENQKHSKVKSTCVHSGSKMIVKASYRGDTIRFKFDPSAGCFQLYDEVATRFKLQNGSFQLKYLDDEEEWVMLVNDSDLQECIEILDDIGTRCVKFLVRDVPCVLSSRGSNNCFLSDSS

SEQ ID NO: 345 - protein, 978 aa, Phaseolus vulgaris
MEYPFSSKGREIGDWQSSGTQLVGSTSLDARMSNSISEDMSNSFSELMSFDTYAGLCNSPSISDQILANELPSFASLSYSLPDGFNIVQQNNGQCYMSEVGRNNNDMESSPIYGEKVACQQMDTLLGFLSDANEANNLNSKLKVNGSPQHLNNSVAGNYIMSRPPALSLDERMLRALSFFKESAGGGILAQVWVPIKDGDQLILSTSEQPYLLDQMLAGYREVSRTFTFSAEGKSDCFLGLPGRVFTSKVHEWTSNVGYYSMNEYLRFEHAVNHHVRGSIAFPIFDVHSELSCCAVLEIVTTKEKPDFSREFEIVCRALQLVNLRTVKPLRCLPQCLSNNKKATLTEIVDVLRSVCHAHRLPLALTWLPCCYTEGSRGEATRIIKGGHSTNSGKSILCIEESACYITDRALEGFVRACTEHPLEEGKGIAGKALRSNHPFFCPDVKTYDVSEYPLVHHARKYNLNAAVAIRLRSTYTNNDDYILEFFLPVNMKGGSEQQLLLDNLSGTMQRICSSLRTVSDIELSRIESSQEGFGKKNAPCFSPLSSRNSEVPLENGDCHSVPMMSLKATNARDNEIEPSTHQGRNGTKRQVQKNRSTSEKSVSLSVLQQYFSGSLKDAAKNIGVCPTTLKRICRQHGISRWPSRKINKVNRSLKKIQTVLDSVQGVEGGLKFDPSMGAFVAGGSTIQETDAHKSLLFPEKSIVKDATPITQKSVSVPPAPCSEVENFAFKLDEKLKKTNAFSVGCSEDSKSMAIDDGSCKMERLCIKVQDCPEQACLGSVFPKEQDKWILNKSGLGVENFKSSIRGQSSNSLFGNQMHIGVDGDAGVIEPNHPSSSSLTDSSNGSGSMMHSISSGSQSFKNQNQSNVKSTIVDSGSKLIVKAIYREDTIRFKFDRSAGCFSLYEEVAARFKLQTGSFQLKYLDDEEEWVMLVNDADLQECLEILDDIGTCNVRFLVRDLPLILSSSGSSNCYLGGSS

SEQ ID NO: 346 - protein, 959 aa, Prunus avium
MEYPFSPKEKGSDHWASSRAQVENLGSLDVGTRNSISEDMFNNISELMNFDTYAGWCSPAAMDQISASFGVPSCPSVTYVPLDALNFAEQNGGALPGTEGGETFNVGESSFSGEDKIVFQQMDTPQFGVSTDSHDANDLAAKLNNGSFQQNNVMEVGKYMISRPPGLSLNEKMLKALSLFKESSGGGILAQLWVPMKYGDHYLLSTCEQPYLLDHILAGYREVSRTFTFSAEEKQGSVLGLPGRVFVSKVPEWTSNVSYYNKAEYLRVDHAVNHQVRGSIALPVFNFDSEMSCCAVLELVSTKEKPNFDAEMEIVCNALQAVNLRTTVPPRLLPQCLSMNQRAALAEITDVLRAVCHAHILPLALTWIPCCYSEGDGDEIRRVRVRGGITNSNEKSILCIEETACYVNDRTMQGFVHACVEHHLEEGEGIAGKALQSNHPFFLHDVKVYDIYEYPLVHHARKYGLNAAVAIRLRSTYTGDDDYILEFFLPVNVKGSSEQQLLLNNLSGTMQKMCKSLRTVSDAELAGVQGCNTGVQKGPIPNIPQQRNSQTTSSDSEFNSMENMPSDVLNRRNGGIEAENPREQAPGSRRQMEKKRSTAEKNVSLSVLQQYFSGSLKDAAKSIGVCPTTLKRICRQHGISRWPSRKINKVNRSLKKIQTVLDSVQGVEGGLKYDPTTGGFVATGSIIQEFDAQKSRLFPEKSLPVQNSELVTQDPVPVPSVSCNNGESFAIKLEEDGCCIPTSHEEGVKKQNIPLMPQRDSKPIAIEGNKWGHSKNSLKLENSDCHFVSQSSSSLAAADDMDTGVDGDDGIVEYNQHTSSSLTDSSNCSGSTLRSSSSQSFEEQKQPNMNASSVENGSKIIVKATYKEDTIRFKFDPSVGCFQLYEEVAKRLKLQNGTFQLKYLDDEEEWVMLVSDADLRECLEILDDIGTRSVKFMVRDTPFGVGSSGSSNCFLAGGI

SEQ ID NO: 347 - protein, 991 aa, Prunus avium
MEYPFSPKEKGSDHWASSRAQVENLGSLDVGTRNSISEDMFNNISELMNFDTYAGWCSPAAMDQISASFGVPSCPSVTYVPLDALNFAEQNGGALPGTEGGETFNVGESSFSGEDKIVFQQMDTPQFGVSTDSHDANDLAAKLNNGSFQQNNVMEVGKYMISRPPGLSLNEKMLKALSLFKESSGGGILAQLWVPMKYGDHYLLSTCEQPYLLDHILAGYREVSRTFTFSAEEKQGSVLGLPGRVFVSKVPEWTSNVSYYNKAEYLRVDHAVNHQVRGSIALPVFNFDSEMSCCAVLELVSTKEKPNFDAEMEIVCNALQAVNLRTTVPPRLLPQCLSMNQRAALAEITDVLRAVCHAHILPLALTWIPCCYSEGDGDEIRRVRVRGGITNSNEKSILCIEETACYVNDRTMQGFVHACVEHHLEEGEGIAGKALQSNHPFFLHDVKVYDIYEYPLVHHARKYGLNAAVAIRLRSTYTGDDDYILEFFLPVNVKGSSEQQLLLNNLSGTMQKMCKSLRTVSDAELAGVQGCNTGVQKGPIPNIPQQRNSQTTSSDSEFNSMENMPSDVLNRRNGGIEAENPREQAPGSRRQMEKKRSTAEKNVSLSVLQQYFSGSLKDAAKSIGVCPTTLKRICRQHGISRWPSRKINKVNRSLKKIQTVLDSVQGVEGGLKYDPTTGGFVATGSIIQEFDAQKSRLFPEKSLPVQNSELVTQDPVPVPSVSCNNGESFAIKLEEDGCCIPTSHEEGVKKQNIPLMPQRDSKPILEEDGCCIPTSHEEGVKKQNIPLMPQRDSKPIAIEGNKWGHSKNSLKLENSDCHFVSQSSSSLAAADDMDTGVDGDDGIVEYNQHTSSSLTDSSNCSGSTLRSSSSQSFEEQKQPNMNASSVENGSKIIVKATYKEDTIRFKFDPSVGCFQLYEEVAKRLKLQNGTFQLKYLDDEEEWVMLVSDADLRECLEILDDIGTRSVKFMVRDTPFGVGSSGSSNCFLAGGI

SEQ ID NO: 348 - protein, 959 aa, Prunus mume
MEYPVTPKEKGSDHWASSRAQVENLGSLDVGTRNSISEDMFNNISELMNFDTYAGWCSPAAMDQISASFGVPSCPSVTYAPLDALNFAEQNGEALPGTEGGETFNVGGSSFSCEDKIVFQQMDNPQFGVSTDSHDANDLAAKLNNGSFQQNNVMDVGKYMISRPPGLSLNEKMLKALSLFKESSGGGILAQLWVPVKYGDHYLLSTCEQPYLLDHILAGYREVSRTFTFPAEEKQGSILGLPGRVFVSKVPEWTSNVSYYNKAEYLRVDHAVNHQVRGSIALPVFNFDSEMSCCAVLELVSTKEKPNFDTEMEIVCNALQAVNLRTTLPPRLHPQCLSMNQRAALTEITDVLRAVCHAHILPLALTWIPCCYSEGDGDEIRRVRVRGGITNSNEKSILCIDETACYVNDRTMQGFVHACVEHHLEEGEGIAGKALKSNHPFFLHDVKVYDIYEYPLVHHARKYGLNAAVAIRLRSTYTGDDDYILEFFLPVNVKGSSEQQLLLNNLSGTMQKMCKSLRTVSDAELAGVQGSNTGFQKGPIPNSPQQRNSQTASSDSELNSIENMPSDVFNRRNVGIEAENPREQAPGSRRQMEKKRSTAEKNVSLSVLQQYFSGSLKDAAKSIGVCPTTLKRICRQHGISRWPSRKINKVNRSLKKIQTVLDSVQGVEGGLKYDPTTGGFVATGSIIQDFDAQKSRLFPEKSLPVQNSELVTQDPVPVPSVSCNNGESLAIKLEEDGCCIPTSHEEGVKKQNIPLMPQRDSKPIAIEGNKWGHSKNSLKLENSDCHFVSQSSSSLAAADDMDTGVDGDDGIVEYNQHTSSSMTDSTNCSGSTLRSSSSQSFEEQKQPNMNASSVENGSKITVKATYKEDTIRFKFDPSVGCFQLYEEVAKRLKLQNGTFQLKYLDDEEEWVMLVSDADLRECLEILDDIGTRSVKFMVRDTPFGVGSSGSSNCFLAGGL

SEQ ID NO: 349 - protein, 956 aa, Prunus persica
MEYPFSPKEKGSDHWASSRAQVENLGSLDVGTRNSISEDMFNNISELMNFDTYAGWCSPAAMDQISASFGVPSCPSVTYAPLDALNFAEQNGEALPGTEGGETFNVGGSSFSCEDKIVFQQMDTPQFGVSTDSHDANDLAAKLNNGSFQQNNVMDVGKYMISRPPGLSLNEKMLKALSLFKESSGGGILAQLWVPVKYGDHYLLSTCEQPYLLDHILAGYREVSRTFTFPAEEKQGSILGLPGRVFVSKVPEWTSDVSYYNKAEYLRVDHAVNHQVRGSIALPVFNFDSEMSCCAVLELVSTKEKPNFDTEMEIVCNALQVSFSIHVIYCLQCLSMNQRAALTEITDVLRAVCHAHILPLALTWIPCCYSEGDDDEIRRVRVRGGITNSNEKSILCIEETACYVNDRTMQGFVHACVEHHLEEGEGIAGKALQSNHPFFLHDVKVYDIYEYPLVHHARKYGLNAAVAIRLRSTYTGDDDYILEFFLPVNVKGSSEQQLLLNNLSGTMQKMCKSLRTVSDAELAGVQGSNTGVQKGPIPNSPQQRNSQTTSSDSELNSIENMPSDVFNRRNGGIKAENPREQAPGSRRQMEKKRSTAEKNVSLSVLQQYFSGSLKDAAKSIGVCPTTLKRICRQHGISRWPSRKINKVNRSLKKIQTVLDSVQGVEGGLKYDPSTGGFVATGSIIQEFDAQKSRLFPEKSLPVQNSELVTQDPVPVPSVSCNTGESLAIKLEEGGCCIPTSHEEGVKKQNILLMPQRDSKPIAIEGNKWGHSKNSLKLENSDCHFVSQSSSSLAAADDMDTGVDGDDGIVEYNQHTSSSMTDSTNCSGSTLRSSSSQSFEEQKQPNMNASSIENGSKIIVKATYKEDTIRFKFDPSVGCFQLYEEVAKRLKLQNGTFQLKYLDDEEEWVMLVSDADLRECLEILDDIGTRSVKFMVRDTPFGVGSSGSSNCFLAGGL

SEQ ID NO: 350 - protein, 959 aa, Prunus persica
MEYPFSPKEKGSDHWASSRAQVENLGSLDVGTRNSISEDMFNNISELMNFDTYAGWCSPAAMDQISASFGVPSCPSVTYAPLDALNFAEQNGEALPGTEGGETFNVGGSSFSCEDKIVFQQMDTPQFGVSTDSHDANDLAAKLNNGSFQQNNVMDVGKYMISRPPGLSLNEKMLKALSLFKESSGGGILAQLWVPVKYGDHYLLSTCEQPYLLDHILAGYREVSRTFTFPAEEKQGSILGLPGRVFVSKVPEWTSDVSYYNKAEYLRVDHAVNHQVRGSIALPVFNFDSEMSCCAVLELVSTKEKPNFDTEMEIVCNALQAVNLRTTVPPRLLPQCLSMNQRAALTEITDVLRAVCHAHILPLALTWIPCCYSEGDDDEIRRVRVRGGITNSNEKSILCIEETACYVNDRTMQGFVHACVEHHLEEGEGIAGKALQSNHPFFLHDVKVYDIYEYPLVHHARKYGLNAAVAIRLRSTYTGDDDYILEFFLPVNVKGSSEQQLLLNNLSGTMQKMCKSLRTVSDAELAGVQGSNTGVQKGPIPNSPQQRNSQTTSSDSELNSIENMPSDVFNRRNGGIKAENPREQAPGSRRQMEKKRSTAEKNVSLSVLQQYFSGSLKDAAKSIGVCPTTLKRICRQHGISRWPSRKINKVNRSLKKIQTVLDSVQGVEGGLKYDPSTGGFVATGSIIQEFDAQKSRLFPEKSLPVQNSELVTQDPVPVPSVSCNTGESLAIKLEEGGCCIPTSHEEGVKKQNILLMPQRDSKPIAIEGNKWGHSKNSLKLENSDCHFVSQSSSSLAAADDMDTGVDGDDGIVEYNQHTSSSMTDSTNCSGSTLRSSSSQSFEEQKQPNMNASSIENGSKIIVKATYKEDTIRFKFDPSVGCFQLYEEVAKRLKLQNGTFQLKYLDDEEEWVMLVSDADLRECLEILDDIGTRSVKFMVRDTPFGVGSSGSSNCFLAGGL

SEQ ID NO: 351 - protein, 961 aa, Pyrus x bretschneideri
MDYHFLPKDKGNNHWASAGAQVENLASFDGGTTIQIPEDMFNNISELMNFDTYSGWCSPAAMDQVAASLGVPSCTSVTYAPFYALNFVEPNGEQSGAGTFNVGENFSCGDKIVFDQMGTPQYGVSTDSDEANDSAIKLNNSSFQHNNPMDMERYMIYRPPGLSLNEKMLKALSMFKEISSGGILAQLWVPMKHGDQYLLSTCEQPYLLDHILAGYREVSRMFTFSTKGKQSSILGLPGRVFVSKIPEWTSNVIFYNKTEYIRVDYAANHQVRGSIALPIFDFDMEMSCCAVLELVSTKAKANFDTEMEIVCSALQAVNLRTNAPLRLLPQCLSENQRAALTEISDVLRVVCHAHLLPLAMTWIPCCYSEGNGDEIKRVRAKGGITNSNEKCIICIEETACYVNDSRMQGFVHACAEHHLEEGEGIAGKALQSNHPFFINDVKVYDICEYPLVHHARKYGLNAAVAIKLRSTYTGDDDYILEFFLPVNVKGSTEQQLLLNNLSGTMQKICKSLRTASDAELVGLEGTNTRFPQRHSRTTLSDSEMKSAKNVTFNVFNRKNGGIKRDNPPGKAPSGSRRQVEKKRTTTGKNVSLSVLQQYFSGSLKDAAKSIGVCPTTLKRICRQHGIMKWPSRKISKVNRSLEKIQTVLDSVQGVDGGLKYDPTTGGFVATGSIIQEVDAPQNILFPKKNLHVENSEPVTQDLVSVSSLSINNGEILTVKLEKDGSCVPTSHENEVKNQSIPLMPQGDSKPIAIDFGSCDPTNRGTTPDTKGSYLAKEVNNWGYTQNSDCHFVSQSSGFLVATDEMDMGVHGNGGIVEHNQHSSSSLTDSSNGFGSIMQGYSSSSQSFEEHKHPQVETTTGENGSKIIVKATYIEDIIRFKFEPSLGCLQLYEEVAKRLKLQTGTFQLRYLDDEEEWVMLVCDADLQECLEILDDIGTRCVKFLVRDITFGMGSSGSSNFLG

SEQ ID NO: 352 - protein, 979 aa, Pyrus x bretschneideri
MDYHFSPKDKGNDHWASARAQVENLASFDDGTRNPISEDMFNNISELMNFDTYAGWCSPAATDQIAASLGMPSCPSVTYTPLDALNLVEHNGEQLLVTSGAGTFNVGGSFNCGDKIVFEHMGTPQYGVSTDSNDANDSIVKLNNGSFQQNNVMGMEDYMIYRPPGLSLNEKMLKALSMFKETSGGGILAQLWVPMKHGDQYLLSTCEQPYLLDHILTGYREVSRMFTFSAEEKQGSILGLPGRVFVSKTPEWTSNVSFYNKTEYLRVDHAANHQVRGSIALPIFDFDLESSCCAVLELVSTKEKPNFDTEMEIVCSALQAVNLKTNAPLRLLPQCLSKNQRAALTEINDVLRAICHAHLLPLAMTWIPCCYSEGDGDGIKRVRVKGGFTNSDEKCILCIEETACYVNDRRMQGFVHACAEHHLEEGEGIAGKALQSNHPFFMNDVKAYNIYEYPLVHHARKYGLNAAVAIRLRSTYTGDDDYILEFFLPVNVKGSTEQQLLLNNLSGTMQRICKSLRTVSDAELVGLGGANTGFQKETSPNIPERNFQTTLSDSEMNSAENVTFNVFNQRNRGIERVNPPKQAPSGSIRQAEKKRSTAEKNVSLSVLQQYFSGSLKDAAKSIGVCPTTLKRICRQHGISRWPSRKINKVNRSLRKIQTVLDSVQGVEGGLKYDPTTGGFVATGSIIQEVDAPKNLLFPEKNLLIENSESVAQHPISMPSMSYNNGESLTVKLEEDGNCVPTSHEKEVKTQSIPFMPQGDSKPIAMDFGSCDPTNHGITPDLKGSYLAKEVNKWGHIQNSLRLDNSDCHFVSQNSSFLGPADEMDIGVHGDDGIVEYNQHSSSSLTDSSNDFGSTMQGYSSSTQSFEEQKHPQVETSTAENGSKIIVKATYKEDTIRFKFEPSLGCLQLYEEVAKRLKLQNGTFQLKYLDDEEEWVMLVSDADLQECLEILDDIGKRCAKFMVRDIPSGVGSSGSSNFLG

SEQ ID NO: 353 - protein, 963 aa, Pyrus x bretschneideri
MDYHFLPKDKGNNHWASAGAQVENLASFDGGTTIQIPEDMFNNISELMNFDTYSGWCSPAAMDQVAASLGVPSCTSVTYAPFYALNFVEPNGEQSGAGTFNVGENFSCGDKIVFDQMGTPQYGVSTDSDEANDSAIKLNNSSFQHNNPMDMERYMIYRPPGLSLNEKMLKALSMFKEISSGGILAQLWVPMKHGDQYLLSTCEQPYLLDHILAGYREVSRMFTFSTKGKQSSILGLPGRVFVSKIPEWTSNVIFYNKTEYIRVDYAANHQVRGSIALPIFDFDMEMSCCAVLELVSTKAKANFDTEMEIVCSALQAVNLRTNAPLRLLPQVHCLSENQRAALTEISDVLRVVCHAHLLPLAMTWIPCCYSEGNGDEIKRVRAKGGITNSNEKCIICIEETACYVNDSRMQGFVHACAEHHLEEGEGIAGKALQSNHPFFINDVKVYDICEYPLVHHARKYGLNAAVAIKLRSTYTGDDDYILEFFLPVNVKGSTEQQLLLNNLSGTMQKICKSLRTASDAELVGLEGTNTRFPQRHSRTTLSDSEMKSAKNVTFNVFNRKNGGIKRDNPPGKAPSGSRRQVEKKRTTTGKNVSLSVLQQYFSGSLKDAAKSIGVCPTTLKRICRQHGIMKWPSRKISKVNRSLEKIQTVLDSVQGVDGGLKYDPTTGGFVATGSIIQEVDAPQNILFPKKNLHVENSEPVTQDLVSVSSLSINNGEILTVKLEKDGSCVPTSHENEVKNQSIPLMPQGDSKPIAIDFGSCDPTNRGTTPDTKGSYLAKEVNNWGYTQNSDCHFVSQSSGFLVATDEMDMGVHGNGGIVEHNQHSSSSLTDSSNGFGSIMQGYSSSSQSFEEHKHPQVETTTGENGSKIIVKATYIEDIIRFKFEPSLGCLQLYEEVAKRLKLQTGTFQLRYLDDEEEWVMLVCDADLQECLEILDDIGTRCVKFLVRDITFGMGSSGSSNFLG

SEQ ID NO: 354 - protein, 969 aa, Quercus suber
MDYPLSPKEKGTGFWQSPRPQLENSVSFEVSRSLNLEDSLSDLMNFDTDAGWYNSPSATDQILTSYGLSSFPSTPFGVSSDALNFSEQNGGAFPVNEVGGTFNPVGNSFNCGDKLMFDQMDTQYGFSTDSNDANGLATAQNNCSFPQNNVFDMGNCMIPRPLSMSVDEKMLKALSLFKASSGGGILAQVWVPMRLGDQHILSTWEQPYLLDEMLAGYREISRSFVFPTERRSGSFLGLPGRVFISKVPEWTSNVSYYNKVEYLRADHAAQHEVRGSIAVPVFDSPEMSCCAVLELVTTKEKSNFNAELETVCNALQAVKLRTTEPPRLRPQCLSKNQRAALAEIIDVLRAVCHAHRLPLALTWIPCYYTEGAGDEMPRVRVREGNTNSNEKCILCIEETACYVNDRTKEGFVYACLEHHLEEGQGIAGKALQSNHPFFYADVKNYDISEYPLVHHARKFGLNAAVSIRLRSTYTGEDDYILELFLPVNMKGSAEQQLLLNNLSGTMQRICKSLRTVSDAENQNFPLMAMPGENSQLTLSDNDVNSTEKMPLEVSNTRNDIIEPDSLHKQATSGSRRHEKKRSTAEKNVSLSVLQQYFSGSLKDAAKSIGVCPTTLKRICRQHGISRWPSRKINKVNRSLRKIQTVLDSVQGVEGGLKFDPNTGEFMAAGSIIQETVSQKSLFPDKNLCVKNAELATQNAVSVPSAPGFDGMNSLIKLEEDDCSMGLNQVAPSMGKLNTNTCGEELRKSNAVPCQQASLETTSQASPESVSLGSYLVNRGEKYSLNMDSLKLENDCQFVSLSSLAAGDDIDTGINVDDGIVEHNQPSSSGMTDSSNGSSSMIRGSSSSSQSFEEQKYSKVKTSCVDSGSKIIVKATYREDTIRFKFEPSAGCFQLYEEVGKRFKLQNGTFQLKYLDDEEEWVMLVSDSDLQECLEILDDIGTRSVKLLVRDMPCSMNSSGSSNCFLTGGL

SEQ ID NO: 355 - protein, 969 aa, Quercus suber
MDYPLSPKEKGTGFWQSPRPQLENSVSFEVTRSLNLEDSLSDLMNFDTDAGWYNSPSATDQILTSYGLSSFPSTPYGVSSDALNFSEQNGVAFPVNEVGGTFNPVGNSFNCGDKLMFDQMDSQYGFSTDSNDANGLATAQNNCSFPQNSVFDMGNCMIPRPLSMSVDEKMLKALSLFKASSGGGILAQVWVPMRLGDQHILSTWEQPYLLDEMLAGYREISRSFVFPTERRSGSFLGLPGRVFISKVPEWTSNVSYYNKVEYLRADHAAQHEVRGSIAVPVFDSPEMSCCAVLELVTTKEKSNFNAELETVCNALQAVKLRTTEPPRLRPQCLSKNQRAALAEIIDVLRAVCHAHRLPLALTWIPCYYTEGSGDEMPRVRVREGNTNSNEKCILCIEETACYVNDRTMEGFVYACLEHHLEEGQGIAGKALQSNHPFFYADVKNYDISEYPLVHHARKFGLNAAVSIRLRSTYTGEDDYILELFLPVNMKGSAEQQLLLNNLSGTMQRICKSLRTVSDAENQNFPLMAMPGENSQLTLSDNDVNSTEKMPLEVSNTRNDIIEPDSLHKQATSGSRRHEKKRSTAEKNVSLSVLQQYFSGSLKDAAKSIGVCPTTLKRICRQHGISRWPSRKINKVNRSLRKIQTVLDSVQGVEGGLKFDPNTREFMAAGSIIQETVSQKSLFPDKNLCVKNAELATQNAVSVPSAPGFDGMSSLIKLEEDDCSMGLNQVAPSMGKLNTNTCGEELRKSNAVPCQQASLETTSQASPESVSLGSYLVNRGEKYSLNMDSLKLENDCHFVSLSLLAAGDDIDTVIDVDDGIVEHNQPSSSGMTDSSNGSSSMMRGSSSSSQSFEEQKYSKVKTSCVDSGSKIIVKATYREDTIRFKFEPSAGCFQLYEEVGKRFKLQNGTFQLKYLDDEEEWVMLVSDSDLQECLEILDDIGTRSVKLLVRDMPCSMNSSGSSNCFLTGGL

SEQ ID NO: 356 - protein, 961 aa, Solanum lycopersicum
MENGIGFWASPRCSYIDDNVMEIMNLDTCAGIEQIFASYPTFSPINPMSIDYAPFEEQNTETFPCEGVNLMFQQNDDQFCFVESSEEADLVVETGMGKNSSKQNYVTHIVEKCVIPKSPCQSLAERMLKALELFKKSSGEGILAQVWVPMKSGDQYILSTYEQPFLLDQVLSGYREVSRKFTFDLEMKPGSCPGLPGRVFTSRIPEWTSNVMYYKEAEYLRVQYAVDHEVRGSIALPILEDEEYDTLCCAVLELVTVKERPNFDLETSHVCQALQAVNLRSTTPTQFSSQSLSKNQRAALAEVKDVLRAVCHAHRLPLALTWIPRSRGGGGDEIRAHARESIASLDEKSVLCVENTACYVSDKEMQGFLHACMGHDLEEGQGIVGKSLQSNHPFFYPDVKEYHINEYPLVHHARKFGLNAAVAIRLRSILTGDDDYVLEFFLPVDMEGSTEQQLLLNNLSRTMQRICRSLRTLSDAELIGEGGEKCGLQSESVLSPPPIDLSRKSSQQSLLNSTLDLSKAPIDVCDSERAGIEANISHKQTPSVSRKRTEKKRSAAEKHVSLSVLQQYFSGSLKNAAQSIGVCPTTLKRICRQYGISRWPSRKISKVNRSLVKIRTVLQSVQGIEGGLKFDTVTGGIVAATSILQDFDSQKSMLSPCKDVSIKSSEFLFQDAVSALQTSCIDNHDSLVKMEEDLNVDGNQLPESSHFGPSSFRVGDKPNSLLSGVCHGSKLAALDRRSSLPANPDTMPRTSSGNVSLDSFHTKGGWRSCGLNTSNLKLDNSGCHFISLCPDSMAKTDDIEEKMKGSIEVDGDDGVMEHHKVSSSGVTDLSNTSRSTMNGSSSSSHSSGERKHTTAEDGGSQITVKASYVKDKIRFKFEPSAGCFQLYEEVAKRFKLQIGTFQLHYLDDEEEWVMLVNDADLNECLEILDILGTRNVKFLVQDVSGTVGSSGSSNCFLTNGS

SEQ ID NO: 357 - protein, 986 aa, Solanum lycopersicum
MERGVDFWASPKGQMEGVASFDASTRSSNVDSFNNVMEIMNLDAYAGWCTSPSAAEHMLASYAAFSPINHMSQSYAPFEGLSYTEQNSGAFPPMDANMVVSNHDGGEKMMFGQTDDQLHFMVDSVDGEDGLGAKRSRRSSQPSDGADIGNSMIPRSPSQPLAERMLRALAMFKESSAAGILAQVWIPMKNGDQYVLSTCEQPYLLDQVLSGYREVSRKFTFDTEIKPGAIPGLPGRVFSSRIPEWTSNVLYYKEAEYLRVQYAVNHEVRGSIALPVFEDDACETPCCAVLELVTMKEKRNFDLEMDHVCQALQAVNLRSTAPPRLHSQNLSNNQKDALAEITDVLRAVCHAHKLPLALTWIPCNVTEGEGDEPIRVRARGCNTSLNEKCVLCVEDTACYVSDKEMQGFVHACMEHFLEEGEGIVGKALQSNHPFFYPDVKEYHISEYPLVHHARKFGLNAAVAIRLRSTFTGNDDYILEFFLPTSMKGSTEQQLLLNNLSGTMQRICKSLRTVADVELVGQDTKFGLQDGSVPNLPPIALSRKNFQHSLDSNSNSVNEAPLGACDSKSAGTHADDSHEQTMTGSRRQIEKKRSTAEKHVSLSVLQQYFSGSLKDAAKSIGVCPTTLKRICRQHGISRWPSRKINKVNRSLKKIQTVLESVQGVEGGLKFDPASGGLVPAGSITQDFDAQRSIFFPFKDVSVKNPTSVFQDTVSVPSSSGNDKENSMVKMEEDFFADGNQLSQSNHVNTSSFKEVTKSSIEVSGYCYESKLPLTDSGNASLGPFLSKGGCRRWGLNNDTLDNVDCQFTSQCSYSMAVGSDVDSKMKEDNEMDGDGGVIEHNQASSSAMTDSSNGSESMINGSSSSTHSRGAEKHSKIEVNCGDNGSTITVKATYKEDTIRFKFDLSAGCFQLYEDIAKRFKLHTETFQLKYLDEEEEWVMLVNDADLHECLEILDFSGGRTVKFLVRDTPCALGSSGSSNCFLASGS

SEQ ID NO: 358 - protein, 959 aa, Solanum tuberosum
MENGIGFWASPRCSYIDDNVMEIMNLDTYSGIEQIFASYPTFSPINPMSIDYAPFEEQNTETFPCEGENLMFQQNDDQFCFVDSSEEADLVDEMGKNSSKQNYVTDLVEKCVIPKSPCQSLAERMLKALELFKKSSGEGILAQVWVPMKSGDQYILSTYEQPFLLDQVLTGYREVSRKFTFDLEMKPGSCPGLPGRVFTSRIPEWTSNVMYYKEAEYLRVQYAVDHEVRGSIALPILEDDGHDTLCCAVLELVTVKEKPNFDLETSHVCQALQAVNLRSTTPPQFSSQSLSKNQRAALAEVKDVLRAVCHAHRLPLALTWIPRSCRGGGGEIRAHARESITSLDEKSVLCVENTACYVSDKEMQGFLHACMGHDLEEGQGIVGKSLQSNHPFFYPDVKEYHINEYPLVHHARKFGLNAAVAIRLRSVLTGDDDYVLEFFLPVDMEGSTEQQLLLNNLSRTMQRICRSLRTLSDAELVGEGGEKCGLQSESVLNLPPIDLSRKSSGQSLLDSTLDLSKAPIDVCDPERAGIEANISHKQTPSVSRKRTEKKRSAAEKHVSLSVLQQHFSGSLKNAAQSIGVCPTTLKRICRQYGITRWPSRKISKVNRSLVKIRTVLQSVQGIEGGLKFDTVTGGLVAATSILQDFDSQKRTLFPCKDVSIESSEFLFQDAVSALQTSCVDNHDSLVKMEEDLNVDGNQLPESSHFSPSSFRVGDKPNSSLSGVCHGSKLAALDRRSSLPANPDTVPCTSSVNVSLDSFHTKGGWRSCGLNTSNLKLDNSGCHFISRCPDSMANTDDIEKKMKGSIEMDGDDGVMEHNKVSSSGVTDSSNTSRSTMNGSSSSSRSSGERKHTTVEDGGSQITVKASYMEDKIRFKFEPSAGCFQLYEEVAKRFKLQIGTFHLHYLDDEEEWVMLVNDADLNECLEILDILGTRNVKFLVQDVSCTVGSSGSSNCFLTNGS

SEQ ID NO: 359 - protein, 1002 aa, Solanum tuberosum
MERGVDFWASPKGQVEGVASFDASSRSSNVDSFNNVMEIMNLDAYAGWCTSPSAAEHMIASYAAFSPINHMSQSYAPFEGMSYTEQNTGAFPPMDANMVASNHDGGEKMMFGQNDDQLHFMVDSVDGEDGLVAKKSRRSSQQSDGADIGNSMILRSPSQPLAERMLRALAMFKESSAAGILAQVWIPMKNGDQYVLSTCEQPYLLDQVLSGYREVSRKFTFDTEIKPGAIPGLPGRVFSSRIPEWTSNVLYYKEAEYLRVQYAVDHEVRGSIALPVFEDDACETPCCAVLELVTMKEKPNFDLEMDNVCQALQAVNLRSIAPPRLHSQNLSNNQRDALAEITDVLLAVCHAHKLPLALTWIPCNVTEGEGDEPIRVRARGCNTSSNEKCVLCVEDTACYVSDKEMQGFVHACKEHFLEEGEGIVGKALQSNHPFFYPDVKEYHISEYPLVHHARKFGLNAAVAIRLRSTFTGNDDYILEFFLPTSMKGSTEQQLLLNNLSGTMQRICKSLRTVADAELVGQGAKFGLQDGSVPNLPPIALSRKNSQHSLDSNSNSVNGAPLGACDSKSAGTHADDSREQTMTGSRRQIEKKRSTAEKHVSLSVLQQYFSGSLKDAAKSIGVCPTTLKRICRQHGISRWPSRKINKVNRSLKKIQTVLESVQGVEGGLKFDPATGGLVPAGSIIQDFNAQKSIFFPFKDVSVKNPTSVFQDAAVPSSSGNDKENSVVKMEDFYADGNQLSQSNHINTSSFKEGNKSSIEVSGYCYESKLATLDAGSSGLASLNAMPLTDSGNASLGSFLTKEGCRRWGLNNDTLDNFDRHFTSRCSYPMVVGGDVDSKMKGDNEMDGDGRVIEHNQASSSAMTDSSNGSGSGSMINGSSSSSHSRGAEKHSKVEVNCGDNGSTITVKATYKEDTIRFKFDLSAGCFQLYEDVAKRFKLQTGTFQLKYLDDEEEWVMLVNDADLHECLEILEFGGGRTVKFLVRDTPCALGSSGSSNCFLASGS

SEQ ID NO: 360 - protein, 945 aa, Sorghum bicolor
MDVPTPPSRTSCNSNISNIGSPMQSFDDPFGVAAMTSFDGYSELCSPSVADHIFSLLNDPSAAQQMFAMWPSLGSSPRASAAREDMPFDTYPGPVDAAASLAQRINSASALNPTGVDIGLKDSDGLIPNNGSQQGSNIIPRSVGNFLADRMLMALSLFRKSLSDGVLAQVWMPIEHNGRVVLSTSEQPYLLDQDLAGYREVSRSFYFSVKEEPGLHLGLPGRVFISGVPEWTSSVMYYSKPEYLRMEHALLHEIRGSLAMPVYDPSKGSCCAVLELVTNKEKPDFDAEMDIVCDALQAVNLQTTTDRGNQKVYSENQKSAFTEILDVLRAICHAHMLPLALTWVPTSNSITNGFCVQKNIGVDSQPGKAVLRIHETACYVNDAKMQGFLHACAERHLEKGQGIAGRALKSNLPFFSPDIREYSIEDYPLAHHARKFGLHAAVAIRLRSTYTGNDDYILEFFLPVNCKGCGEQQMLLNNLSSTMQRICKSLRTVSETEIENVRATAPMCEKTNGSCLPTGNSESSSHEDQPITESAFQDLSLGDKQGDREPDKARSSSMRVAEKKRSTSEKNFSLDVLRKYFSGSLRDAAMSLGVCPTTLKRICRQHGISRWPSRKINKVNRSLKKIEKVIKSVHGVDRSLQYDPATGSLVPATSLPDKMPFSACDTLPTSSVGKTVEEKSSPKSEQDLSSPDGWQREASQFHVSSIPKRDGDEVQMLANNNKGSRNYASGIASITPHSNSEDTQGPLCPIVAVNYLHTGEPCYINSPTSLHPSMDSIEGQTMGMNSPFVQQADVTMVDGHDTKEQTHPSTSGMTDSSSGSASSQPTFKGNPGHTLLKDRSSPALTVKATYNGDTVRFKFLPTMGWYHLLEEIAKRFKLTTGAFQLKYKDDEDEWVILANDADLQECMDVLDSISSCNMKLQVRDLPCLISSSGSSSCLQVEAHSS

SEQ ID NO: 361 - protein, 951 aa, Trema levigata
MEHPFSSKEKENEYWSSSRAQVENLASFDGVPRGMLPEDVFNSFSELLTFDAYAGWSNSPAVTDQVSATYGLSSLPSTTYVPMDGSNFVEHNVGALPVTEVGGNFNLPRSSFNYGDKIVFQPENSEMGIVDSTICRPTRYSLDEKMLRALSFVKESSGGGILAQVWVPVKRGDQLFLSTSEQPYLLDHMLAGYREVSRMYTFAAEGKPGCFPGLPGRVFISKIPEWTSDVGYYKKNEYVRVEHAYNHQVRGSLALPVFEPDPGMSCCAVLEIVTTKEKPNFDTEMEIVCHALQAVNLRTNPPPRLVPQCLSKNQKDALAEIIDVLRAVCHAHRLPLALTWIPCCYDGGAASELAGVHVREGKTSSSEKCILCVEKSACYVNDSLMQGFAHACVEHHLEEGQGLAGKALQSNVPFFFPDVKTYDISEYPLVHHARKFGLNAAVAIRLRSTYTGDCDYILEFFLPVNMKGASEQQLLLNNLSGTMQRICKCLRTVSDVEVGAISSDAFQKGSVPNFMSLPGESSQMVLSDSDLNSTDELPLKVSNRRNEGIEADGVHEQAIRGSRRQTEKKRNTAEKNVSLNVLQQYFSGSLKDAAKSIGVCPTTLKRICRQHGISRWPSRKINKVNRSLRKIQTVLESVQGVEGGLKFDPTTGGLVAAGSIAQELDTKKSLFFIEKTSSLQNSDPLSAVKLEEDECCTGGVDPNSGEIRQPNIVASTNSTKDSKIAIEAGSRLPICDARSGAFSDKACLASYHAKEGKTSSQSKCSSKFENSKYYHVSQSSGSLGVGDEMDTAGDGDDELIEHNLPASSSMTDSSNGCGSMLHVSSSSSLSQSFEERKHPKGKMSCGDSGSKIIVKATYREDTVRFKFDTSAGCSQLYEEVAKRFKLQTGTFQLKYLDDEEEWVMLVSDMDLQECLEILDDIGTQSVKFQVRDMPCAVGSSGSSNCFLAGGS

SEQ ID NO: 362 - protein, 978 aa, Trema orientalis
MEHPFSSKEKENEYWSSSRAQVENLASFDGVPRGMLSEDVFNSFSELLTFDAYAGWSNSPAVTDQVSATYGLSSLPSTTYVPMDGSNFVEHNVGALPVTEVGGNFNLPRSSFNYGDKIVFQPVDTQFEVSAQSNNANNSIAKHNNGSFQENSEMGLVDSTICRPTRYSLDEKMLRALSFVKESSGGGILAQVWVPVKRGDQLFLSTSEQPYLLDHMLAGYREVSRMYTFATEGKPGCFPGLPGRVFISKVPEWTSDVGYYKKNEYVRVEHAYNHQVRGSLALPVFEPDPGVSCCAVLEIVTTKEKSNFDTEMEIVFHALQAVNLRTNPPPRLVPQCLSKNQKDALAEIIDVLRAVCHAHRLPLALTWIPCCYNEGAASELAGLHVREGKTSSSEKYILCVEKSACYVNDSLMQGFAHACVEHHLEEGQGLAGKALQSNLPFFFPDVKTYDISEYPLVHHARKFGLNAAVAIRLRSTYTGDCDYILEFFLPVNMKGASEQQLLLNNLSGTMQRICKCLRTVSDAEVGAISSDAFQEGSVPNFMSLPGESSQMVLSDSDLNSTDELPLKVSNRRNEGIEADGVHEQAIRGSRRQTEKKRNTAEKNVSLNVLQQYFSGSLKDAAKSIGVCPTTLKRICRQHGISRWPSRKINKVNRSLRKIQTVLDSVQGVEGGLKFDPTTGGLVAAGSIAQELDTKKSLFFIEKTSSLQNSDPLSAVKLEEDECCTGGVDPNSGEIRKPNIVASTNSTKDSKIAIEAGSRLPICDARSGAFSDKACLGSYHSKEGKTSSQSKCSSKFENSKYYHVSQSSGSLGVGDEMDTAGDGDDELIEHNLPASSSMTDSSNGCGSMLHVSSSSSLSQSFEERKHPKGKMSSGDNGSKIIVKATYREDTVRFKFDTSTGCSQLYEEVAKRFKLQTGTFQLKYLDDEEEWVMLVSDMDLQECLEILDDIGTQSVKFQVRDMPCAVGSSGSSNCFLAGGS

SEQ ID NO: 363 - protein, 978 aa, Trema tomentosa
MEHPFSSKEKENEYWSSSRAQVENLASFDGVPRGMLPEDVFNSFSELLTFDAYAGWSNSPAVTDQASATYGLSSLPSTTYVPMDGSSFVEHNVGALPVTEVGGNFNLPSSSFNYGDKIVFQPVDTQFEVSAQSNNANNSIAKHNNGSFQENSEMGLVDSTICRPTRYSLDEKMLRALSFVKESSGGGILAQVWVPVKRGDQLFLSTSEQPYLLDHMLAGYREVSRMYTFATEGKPGCFPGLPGRVFISKVPEWTSDVGYYKKNEYVRVEHAYNHQVRGSLALPVFEPDPGMSCCAVLEIVTTKEKSNFDTEMEIVFHALQAVNLRPNPPPRLVPQCLSKNQKDALAEIIDVLRAVCHAHRLPLALTWIPCCYNEGAASELAGLHVREGKTSSSEKYILCVEKSACYVNDGLMQGFAHACVEHHLEEGQGLAGKALQSNLPFFFPDVKTYDISEYPLVHHARKFGLNAAVAIRLRSTYTGDCDYILEFFLPVNMKGASEQQLLLNNLSGTMQRICKCLRTVSDAEVGAISSDAFQEGSVPNFMSLPGESSQMVLSDSDLNSTDELPLKVSNRRNEGIEADGVHEQAIRGSRRQTEKKRSTAEKNVSLNVLQQYFSGSLKDAAKSIGVCPTTLKRICRQHGISRWPSRKINKVNRSLRKIQNVLDSVQGVEGGLKFDPTTGGLVAAGSIAQELDTKKSLFFIEKTPSLQNSDPMSAVKLEEDECCTGGVDPNSGEIRKPNIIASTNSTKDSKIAIEAGSRPPSCDARSGAFSDKACLGSYHAKEIKTLSQSKCSSKFENSKYYHVSQSSGSLGVGDEMDTAGDGDDELIEHNLPASSSMTDSSNGCGSMLHVSSSSSLSQSFEERKHPKGKMSSGDNGSKIIVKATYREDTVRFKFDTSAGCSQLYEEVAKRFKLQTGTFQLKYLDDEEEWVMLVSDMDLQECLEILDDIGTQSVKFQVRDMPCAVGSSGSSNCFLAGGS

SEQ ID NO: 364 - protein, 571 aa, Trifolium pratense
VHACIEHPLEEGKGVAGKALQSNHPLFYSDVKTYDISEYPLVHHARKFNLNAAVAIRLRSTYTNNDDYILEFFLPINMKGSSEQQLLLDNLSGTMQKICKSLRTVSGAELSEMESSQEGFEKNSVPSFHPSSKRKSPTPFINENHGSVKKLSSKASNPRNNGNEPSPNQNKGPEILNLYDSITLHLCYKGERNGPKRRAEKYRSSSEKNVSLSVLQQYFSGSLKDAAKSIGVCPTTLKRICRHHGISRWPSRKINKVNRSLKKIQTVLDSVEGVEGGLKFDPSVGAFVAKGTAIQEIDENRSLPFPEKSTTEDSEPFSQDAASVPLAHCSDGENSANKLDGKLKETNASLIDCSEDSKSFAMDDCPEQACFGSVLGKGDQWVLNKGGLREEEKCKHNTIGQRTSSFVVYEMDTGVDGDDEAVENNNPASSSLTGSSNSSGSIVHDSSSGYQNLKNQKQSKSKSIIVDSGSKIVVKATYGEDTIRFKFDPATGCLKLYEEVASRFKLQNGTFQLKYLDDEKEWVMLVNDSDLQECLEILNDMGTRNARFLVRDTPCTFGSSGSSVCYLGGSS

SEQ ID NO: 365 - protein, 913 aa, Trifolium pratense
MNMEDQFSSKDNGISFWTPLDNGMKSSITSDDMFNNISELMNFDNYAGWCNGSSSLIDQTLTSDLSSFAYSPHDGLSLVEQINGPFFMTDIGGNYSSTSYEEKVLLQQMETQFAFLDNANETNNNNLDSQFDMCNYVMSKSPSWSLDERMMSALSFFKESAGGGILAQFWVPIKYGDEIVLTTSNQPYLLDQKLAGYREVSRSFTFSAEIKMGACCPGLPGRVFISHVPEWTSNVGYYHKSEYLRLDHAISHEVRGSIALPISDMNSEVSCSAVLELVTTKEKPNFDKELEYVSHALQRMNLRTITPPRLLPQCVSNNKRAALAEIVDVLRAVCHAHRLPLALTWIPCYYSEGKGEESERLRIKEGRTTNSDEKCVLCIEESACYINDKMVEGFVHACSEHHLEEGQGISGKALQSNHPFFYTDVKAYDISEYPLVHHARKYNLNAAVATRLRSTYTNDDDYVLEFFLPIDMIGSSEQQLLLDNLSDTMRRICKSLRTVSEGELRGIEVSQDGFPKENISGFFPMSKGNSQIAFSTGDPDLFQMPLMAANNGIQGSHSQVTSESRKQAEKRRNAVEKNVSLSVLQQYFSGSLKDAAKKIGVCPTTLKRICRQHGISRWPSRKINKVNRSLKKIQTVLDSVQGVEGVLKFDPHTGGFVAGGSIIEQIGTCNKNLMFPEKSSVENSAIKLEDDGVLISNSCEGDLKKDNNASSDDYIQDSTSWLWTKTHECPKQNSIDSVLEKEEDQCGLNNSSLHDIASNSSFSLIELGLDEGKGLDEPNHPTSSSMTDSSNASGSMVRGSSSGSQSIENHKNSKIKSICVDSESKFAVKATFRGDTIRFKFDPCLGCFQLYEEVATRFKLRNGSFQLKYLDDEEEWVLLVNDSDLKECVEVLSDSGTHCVKLLVRDIHGDGNS

SEQ ID NO: 366 - protein, 965 aa, Trifolium subterraneum
MEYPFYPKGRGIGYWQSPGTQLEESRSLDGGISNLVSEDMPSSFSELMNFDTYAGLCSGPSMTDQIMANELPSLASVLYQSPDEFNLVEQNTGQFYMTGVSGNYNNSESSPVFGEKIVRQQMDSLLGLLDNNNDANNLSSKQKFNDSSQHVNTFDMDNCIISKPPALSLDEKMLKALSFFKESAGGGILAQVWVPIVHGGQVFLSTSEQPYLLDQMLAGYREVSRTFTFSTEGKPGFLPGLPGRVFISKVPEWTSNVGYYSPSEYLRVEHARNHDVRGSIAFPIFDLQSGLPCCAVLELVTTKEKLDFDRELEIICRSLQLVNLRTTMPFRLLPECLSNNKRAALTEIVDVLRSVCHAHRLPLALTWIPCFYTEGTRDETTRIQIKEGNSSSREKNILCIEESACYITDTAMEGFVHACIENPLEEGKGVAGKALQSNHPFFYSDVKTYDISEYPLVHHARKFNLNAAVAIRLRSTYTNNDDYILEFFLPINMKGSSEQQLLLDNLSGTMQKICKSLRTVSGAELSEIESSQAGFEKNSVPSFPPSSKRKSRIPFINENHGSVHKLSSKASNLRNNGNEPSSNQERNGPRRRGEKNRSSSEKNVSLSVLQQYFSGSLKDAAKSIGVCPTTLKRICRHHGISRWPSRKINKVNRSLKKIQTVLDSVEGVEGGLKFDPSVGAFVAKGTAIQEIDENRSLLFPEKSTTEDSEPFSQDAALVPPAHCSDSENSANKLNGKLKEINASLIDCSEDSKSFAMDDCPEQACFGSVLGKGDEWVLNKGGLREEEKCKHNTIGHRTNSFAVYEMDTGVDGDDEAVEHNNPASSSLTGSSNSSGSMVHDSSSGYQNRENQKQSKSKSIIVDSGSKIVVKATYGEDTIRFKFDPATGCLKLYEEVASRFKLQNGTFQLKYLDDEEEWVMLVNDSDLQECLEILNDMGTHNARFLVRDTPCTFGSSGSSGSYLGGSS

SEQ ID NO: 367 - protein, 547 aa, Trifolium subterraneum
MNMEDQFSSKDNGISFWTPLDNGMKSSITSDDMFNNISELMNFDNYAGQGISGKALQSNHPFFYTDVKAYDISEYPLVHHARKYNLNAAVATRLRSTYTNDDDYVLEFFLPINMIGSSEQQLLLDNLSDTMRRICKSLRTVSEGELRGIEGSRDGFLKENISGFFPMSKGNSQIAFSTGDPDLFQMPLMAGSHSQVTSESRKQAEKRRNAVEKNVSLSVLQQYFSGSLKDAAKKIGVCPTTLKRICRQHGISRWPSRKINKVNRSLKKIQTVLDSVQGVEGVLKFDPHTGGFVAGGSIIEQIGTHNKNLMFPEKISVENSAIKLEGDGVLISNSCEGDLKKDNNASSVDYIQDSTSWLWTKTRECPKQKSIDSVLEKEEDQCGLNNSSLHDIASNSSFSLIELGLDEGKGVDEPNHPTSSSMTDSSNASGSMVRGSSSGSQSIENHKNSKIKSICVDSESKFAVKATFRGDTIRFKFDPCLGCFQLYEEVATRFKLRNGSFQLKYLDDEEEWVLLVNDSDLKECVEVLSDSGTHCVKLLVRDIHGNS

SEQ ID NO: 368 - protein, 533 aa, Trifolium subterraneum
MVEEFVHACSEHHLEEGQGISVKALQSNHPFFYTDVKAYDISEYPLVHHARKYNLNAAVATRLRSTYTNDDDYVLEFFLPINMIGSSEQQLLLDNLSDTMRRICKSLRTVSEGELRGIEGSRDGFLKENISGFFPMSKGNSQIAFSTGDPDLFQMPLMAGSHSQVTSESRKQAEKGRNAVEKNVSLSVLQQYFSGSLKDAAKKIGGETPSIFVKICPTTLKRICRQHGISRWPSRKINKVNRSLKKIQTVLDSVQGVEGVLKFDPHTGGFVAGGSIMEQVGTHNKNLMFPEKSSVENSAIKLEDDGVLISNSCEGDLKKDNNVSSVDYIQDSTSWLWTKTRECPKQNSIDSVLEKEEDQCGLNNSSLHDIASNSSFSSIELGLDEGKGVDEPNHPTSSSMTDSSNAFGSMVRGSSSGSQSIENHKNSKIKSICVDSESKFAVKATFRGDTIRFKFDPCLGCFQLYEEVATRFKLRNGSFQLMYLDNEEEWVLLVNDSDLKECVQVLSDSGTHCVKLLVRHIHIVDSSQICLSI

SEQ ID NO: 369 - protein, 938 aa, Triticum aestivum
MDVPLPSQSNRAGCNGSVGSPSDDPYGVTAMMNFDGYSELCGSPSLADQLFSLLNDSSTHQMFAMWSSLGSSPRASGVSEDMQLDAYSSVPGDQKVDLVSSVNPAENGTGRMAKSSGDLGSDGDPEQGSTSVVPRPIAGNLLADRMLMALSLFRKSLGGGVLAQVWMPVEQEGHVVLSTCEQPFLLDQALAGYREVSRHFVFSAKEETCLQPGLPGRVFISGVPEWTSNVLYYSKPEYLRMEYALHHEVRGSLAMPIYDPSKGSCCAVLELITKKEKPDFDAEMNNLRHALQAVNLETAKDCIDQKVYSANQKATFTEILDVLRAICHAHMLPLALTWVPSSNGSDGGYVGHDNVLDSQSGKAILRIHESACYVNDAKMQGFFHACTETHLEKGQGIAGRALKSNLPFFSPNIREYGIKDYPLAHHARKFGLHAAVAIRLRSTYTGDDDYILEFFLPINCTGSEEQQMLLNNLSSTMQRICKSLRTVSEAEVDKVDACTAVMYKATSGSCLPTGQSGSSSHGDQPATEEAFQDLSLIDKQGDMSEQAQSSSMRLAEKKRSTAEKNIGMDVLRKYFSGSLKDAAKSLGVCPTTLKRICRTHGISRWPSRKINKVNRSLKKIQTVINSVHGVDSSLQYDPATGSLVPAVSLPEKTSFPSCDAVSSPSVGKTVDEKSGPKSEQGYSSPEGWERDSCQLQRPDAQKGEGDEFHMQTTNYSGSGDHGSYGPNVTHHIISEGTQGPLYPTGAVSALHDKETGCIEPLPCVLPSIKTTRDQIVGRNSPPMQQADIDMFDDREGREHTHPSTSGMTDSSSGSASSHPTFKKNPARPLKDKSSPALTVKATYNGDTVRFKFLPSMGWYHLLEEIAKRFKLSTGVFQLKYKDDEDEWVIMANDSDLQECVDVMDSMGTRNVKLQVRDLPCLISSSGSSSCLQLEGHNS

SEQ ID NO: 370 - skipped

SEQ ID NO: 371 - protein, 913 aa, Triticum urartu
MDVPLPSQSNRAGCNGSVGSPSDDPYGVTAMMNFDGYSELCGSPSLADQLFSLLNDSSTHQMFAMWSSLGSSPRASGVSEDMQLDAYSSVPGDQKVDLVSSVNPAETGTGRMAKSSGDLGSDGDPEQGSTSLVPRPIAGNLLADRMLMALSLFRKSLGGGILAQVWMPVEQEGHVVLSTCEQPFLLDQALAGYREVSRHFVFSAKEETGLQPGLPGRVFISGVPEWTSNVLYYSKPEYLRMEYALHHEVRGSLAMPIYDPSKGSCCAAVNLETAKDCIDQKVYSANQKAAFTEILDVLRAICHAHMLPLALTWVPSSNGSDGGYVGHDSVLDSQSGKAILRIHESACYVNDAKMQGFFHACTETHLEKGQGIAGRALKSNLPFFSPNIREYGIKDYPLAHHARKFGLHAAVAIRLRSTYTGDDDYILEFFLPINCTGSEEQQMLLNNLSSTMQRICKSLRTVSEAEVDKVDACTAVMYKATSGSCLPTGQSWSSSHGDQPATEEAFQDLSLIDKQGDMSEQAQSSSMRLAEKKRSTAEKNIGMDVLRKYFSGSLKDAAKSLGVCPTTLKRICRTHGISRWPSRKINKVNRSLKKIQTVINSVHGVDSSLQYDPATGSLVPAVSLPEKTSFPSCDAVSSPSVGKTVDEKSGPKSEQGYSSPEGWERDSCQLQRSDAQKGEGDEFHMQTTNYSGSGDHGSYGPNITHHISSEGTQGPLYPTGAVSALHDKETGCIEPLPCVLPSIKTTRDQIVGRNSPPMQQADIDMFDDREGREHTHPSTSGMTDSSSGSASSHPTFKKNPARPLKDKSSPALTVKATYNGDTVRFKFLPSMGWYHLLEEIAKRFKLLTGVFQLKYKDDEDEWVIMANDSDLQECVDVMDSMGTRNVKLQVRDLPCLISSSGSSSCLQLEGHNS

SEQ ID NO: 372 - protein, 1010 aa, Vigna angularis
MEYPFSSKEREIGDWQSSGTQLVGSTSLDSRMNNSISEDMPNSFSELMNFDTYAGLCNSPSISDQILANELPSFASLPYSLPDGFNLVQQNNGQCYMSGVGRNDNDMESSPIYGEKVVCQQVDTLLGFLNDSNEANNLNSKLKINGSSQHLNNSEAGNYIMSRPPALSLDERMLRALSFFKESAGGGILAQVWVPIKNGDQFILSTSEQPYLLDQMLAGYREVSRTFTFSAEGKSGCFLGLPGRVFTSKVHEWTSNVGYYSMNEYLRFEHAINHHVRGSIAFPIFDVHSELLCCAVLEIVTTKEKPDFNREIEIVCRALQLVNLSTAKPLRCLPQCLSNNKKATLTEIVDVLRSVCHAHRLPLALTWLPCCYTEGSRGEVTRIRTKGCHSTISGKNILCLEESACYITDRALAGFVRACTEHHIEEGKGIAGKALRSNHPFFCPDVKEYDISEYPLVHHARKYNLNAVVAIRLRSTYTNHDDYILEFFLPVNMRGGLEQQLLLDNLSGTMQRICSSLRTVSDAELSRIESSPEGFEKTNAPYFPPLSCQNSGVPLINGEYHSVPMMSSTPTKAGGNEIEPSANQGRYGAKRQVQKNKSTSEKNVSLSVLQQYFSGSLKDAAKNIGVCPTTLKRICRQHGISRWPSRKINKVNRSLKKIQTVLDSVRGVEGGLKFDSSMGAFVARGSIIQETDAHKSLLFPEKNIIKDPAHITQEAVPVPRAPSNNPPPKPWEQAGSSSGPAPFKPPSAGNTSDVVEASGTAKPGEIVSASDRTAAVNRNSLGRPVPTRPWEQNYGNNAYGGYGSTMNYNSGYGSGMYGSSYGGIGGGMYGSSYGGGLYGNSTYRGGYGGGMYGSSGMYGGGMYNSGFGGPMGGYGMGGGPYGDQDPNNPFGGPPSPPGFWISVLRVMQGVVNFFGRISILIDQNTQAFHLFMTALLQLFDRSGLLYGELARFVFRLLGIRSKSKKVHPPGPNGQLLPGPYNSSGDVNYIEAPKAAPSGSWDNVWGNDSPQ

SEQ ID NO: 373 - protein, 972 aa, Vigna angularis
MEYPFSSKEREIGDWQSSGTQLVGSTSLDSRMNNSISEDMPNSFSELMNFDTYAGLCNSPSISDQILANELPSFASLPYSLPDGFNLVQQNNGQCYMSGVGRNDNDMESSPIYGEKVVCQQVDTLLGFLNDSNEANNLNSKLKINGSSQHLNNSEAGNYIMSRPPALSLDERMLRALSFFKESAGGGILAQVWVPIKNGDQFILSTSEQPYLLDQMLAGYREVSRTFTFSAEGKSGCFLGLPGRVFTSKVHEWTSNVGYYSMNEYLRFEHAINHHVRGSIAFPIFDVHSELLCCAVLEIVTTKEKPDFNREIEIVCRALQLVNLSTAKPLRCLPQCLSNNKKATLTEIVDVLRSVCHAHRLPLALTWLPCCYTEGSRGEVTRIRTKGCHSTISGKNILCLEESACYITDRALAGFVRACTEHHIEEGKGIAGKALRSNHPFFCPDVKEYDISEYPLVHHARKYNLNAVVAIRLRSTYTNHDDYILEFFLPVNMRGGLEQQLLLDNLSGTMQRICSSLRTVSDAELSRIESSPEGFEKTNAPYFPPLSCQNSGVPLINGEYHSVPMMSSTPTKAGGNEIEPSANQGRYGAKRQVQKNKSTSEKNVSLSVLQQYFSGSLKDAAKNIGVCPTTLKRICRQHGISRWPSRKINKVNRSLKKIQTVLDSVRGVEGGLKFDSSMGAFVARGSIIQETDAHKSLLFPEKNIIKDPAHITQEAVPVPRAPCNEVEEELKKTNAFSVGCCEDSKSMAIDDGSCEMESLCTKVQDCPEQACLGSVLPEEQDKWTGNKSGLRVENCKCSILGQSSNSLIGKEMDIGVDGDAEVVEPNHPSSSSLTDSSNDSGSMMHSISSGSKSFKNQNQSKVKSTIVDSGSKLIVKAIYREDTIRFKFDPSAGCFRLYEEVAARFKLQTGSFQLKYLDDEEEWVMLVNDADLQECLDVLDDIGTCSVRFLVRDLPSILSSSGSSNSYLGGSS

SEQ ID NO: 374 - protein, 966 aa, Vigna angularis
MEDHFSPKGKETGYCTSPCTQLEESTSVDGGMKKSASEDMFSNFSELMNFDTYAGWSNSSSMNYQSLASVFSSFSSASYPPSDGLNLVEQGNGLCFMTEVSEIHNGIESSPSCEERGIFQQMDIQLGFLDEANDSNSFDSKQNRNGLYQQLNTSDMCNYMISRSSGRPLADRMLRSLSFFMESVDEGMLAQVWVPIKHGDEFILCTSEQPYLLDPKLAGYREVSRAFTFSAEGKKGSCPGLPARVFTSHVPEWTSNVGYYNKTEYLRLDHALNHEIRGSIALPVSDMHSHEPCAVLELVTTKEKPNFDRELEIVTQALQLVNLKTTMPPRLLPQCLSSNKRAALTEIVDVLRAVCHAHRLPLALTWIPCCYSEGIGDEAERIRIKEGHTSSDEKCVLCIEESACYINDAAIGGFVHACVEHHLEEGQGIAGKALQSNHPFFYTDVKTYDISEYPLVHHARKYNLNAAVAIRLRSTYTNDDDYILEFFLPVNMTGSSEQQLLLDNLSGTMRRICRSLRTVSDTEITGIEGSVAGFPKEKLSYFFPMSKRNSQIAFINDDYDSNQKMSLKASNNGIEAAHGQVMNGPRKQIEKKRSTVEKNVSLSVLQQYFSGSLKDAAKSIGVCPTTLKRICRQHGISRWPSRKINKVNRSLKKIQTVLDSVQGVEGGLKFDPYTGGFIAGGSLMQEIDTHKYILFPEKSAVKDPKHATQKPVSVVSAPGSTSENSTIKLDDDDDGVCLVENKIVDSRSALLSNTSEGGFKKDNASSDDCCEDSKSVAMNDGSSQKAKNQDCPEQTCSISLVTDEAEVGVDGGEGIEEHNNLINSSSTTNSSNGSGSMMHGSSSCSQSFENQKHSKVKPTCVDSESKMIVKASYRGDTIRFKFDPSAGCFQLYEEVATRFKLQNGLFKLKYLDDEEEWVMLENDSDLQECVEILHDIGTRCVKFLVRDVPCVLSSCGSNNYFLPDSS

SEQ ID NO: 375 - protein, 979 aa, Vigna radiata
  REGION 1..979: note = var. radiata
MEYPFSSKEREIGDWQSFGNQLVGSTSLDSRMSNSISEDMPNSFSELMNFDTYAGLCTSPSISDQILANELPSFASLPYSLPDGFNLVQQNNGQCYMSGVGRNDNDMESSPIYGEKVACQQVDTLLGFLNDANEANNLNSKLKIIGSSQHLNNSDAGNYIMSRPPALSLDERMLRALSFFKESAGGGILAQVWVPIKNGDQFILSTSEQPYLLDQMLAGYREVSRTFTFPAEGKSGCFLGLPGRVFTSKVHEWTSDVGYYSMNEYLRFEHAINHHVRGSIAFPIFEMHSELLCCAVLEIVTTKEKPDFNREFEIVCRALQLVNLSTAKPLRCLPQCLSNNKKATLTEIVDVLRSVCHAHRLPLALTWLPCCYTEGSRGEVTRIRTKGCHSTISGKNILCLEESACYITDRALAGFVRACTEHHIEEGKGIAGKALRSNHPFFCPDVKAYDISEYPLVHHARKYNLNAAVAIRLRSTYTNHDDYILEFFLPVNMRGGLEQQLLLDNLSGTMQRICSSLRTVSDAELSRIDSSQQGFEMKNAPYFPPLSCQNSGVPLINGDYHSVPMMPSTPTNAGGNEIEPSANQGRNGAKRQVQKNRSTSEKNVSLSVLQQYFSGSLKDAAKNIGVCPTTLKRICRQHGISRWPSRKINKVNRSLKKIQTVLDSVRGVEGGLKFDPSMGAFVARGSIIQETDAHKSLLFPEKNIIKDPAHITQEAVPVPRAPCNEVENFSFKLEEELKKTNSFSVGCCEDSKSMAIDDGSCEMESLCTKLQDCPEQACLGSVLPKEQEKWTRNKSGLRVENFKCSILGQSSNSLIGKEMDIGVDGDAEVVEPNHPSSSSLTDSSNDSGSMMHSISSGSESFKNHNQSKVKSTIVDSGSKLIVKAIYREDTIRFKFDRSAGCFRLYEEVAARFKLQTGSFQLKYLDDEEEWVMLVSDADLQECLDILDDIGTCSVRFLVRDLPSILTSSGSSNSYLGGSS

SEQ ID NO: 376 - protein, 967 aa, Vigna radiata
  REGION 1..967: note = var. radiata
MEDHFSPKGKETGYCTSPCTQLEESTSVDGGMKKSASEDMFSNFSELMNFDTYAGWSNSSSMTYHSLANVFSSFSSASYPPSDGLNLVEHGNGPCFMTEVSEIHNGIESSPSCEERGIFQQMDIQLGFLDEANDSNSFDSEQNRNGSYQQFNTSDMCNYMISRSSGRPLDDRMLRALSFFMESVDEGMLAQVWVPIKHGDEFILCTSEQPYLLDPKLAGYREVSRAFTFSAEGKKGSCPGLPARVFTSHVPEWTSNVGYYNKTEYLRLDHALNHDIRGSIALPVSDMHSHEPCAVLELVTTKEKPNFDRELEIVTHALQLVNLKTTMPPRLLPQCLSSNKRAALTEIVDVLRAVCHAHRLPLALTWIPCCYSEGIGDEAERIRIKEGHTSSNEKCVLCIEESACYINDGAIGGFVHACVEHHLEEGQGIAGKALQSNHPFFYTDVKTYDISEYPLVHHARKYNLNAAVAIRLRSTYTNDDDYILEFFLPVNMTGSSEQQLLLDNLSGTMRRICRSLRTVSDAEITGIEGSVAGLPKEKLTYFFPMSRRNSQIAFINDDNDSNQKMSLKASNNGIEAAHGQVMNGPRKQIEKKRSTVEKNVSLSVLQQYFSGSLKDAAKSIGVCPTTLKRICRQHGISRWPSRKINKVNRSLKKIQTVLDSVQGVEGGLKFDPYTGGFIAGGSLMQEIDTHKYILFPERSAVKDPKHATQKPVSVVSAPGSTSENSTIKLDDDDGVCLVENKIVDSRSALLSNTSVGGFKKDNASSDDCCEDSKSVAMNDGSSQKAKNQDCPEQTCSISLVTDEAEVGVDGGEGIEEHNNLVNSSSTTNSSNGSGSGSMMHGSSSCSQSFENQKHSKVKPTSVDSESKMIVKASYRGDTIRFKFDPSAGCFQLYEEVATRFKLQNGLFKLKYLDDEEEWVMLENDSDLQECVEILHDIGTRCVKFLVRDVPCVLSSCDSNNCFLSDSS

SEQ ID NO: 377 - protein, 1000 aa, Ziziphus jujuba
MEYPISSKEKGIENWASSRAQVESMASFDGGTRNSLAEDMFNNISEFMDFDNYAGWCDSSSAVDQMAASYGLPSYPSVSYAPMDAFNFTEQSIGSLPVAEAGGDFNLEKGPLNYGDKTVFQQVDNQYGLSSNSNVANESVTKQSDGSFQQNNVVDVANSIISRPPAVSLDEKMLKALSLFKESSGGGILAQVWVPMKHGDQYFLSTCERPYLLDHMLAGYREVSRLYKFSAEGKQGSFPGLPGRVFMSKIPEWTSNVGYYSKTEYLRADHAHNHQVRGSIALPVFDSEPEVSCCAVLELVTTKEKSNFDSEMEVVCRSLQAVNLRTSVPPRLLPQCLSENQKDALAEIVDVLRVVCHAHRLPLALTWIPCCYTEGAGKENMGLHVREGNKSSNGKSILCIEETACYVNDRAMLDFVRSCVENYLEEGQGLAGKALQSNVPFFFPDVKTYNIYEYPLVHHARKFGLNAAVAIRLRSTYTGDEDYILELFLPVNMTGALEQQLLLNNLSRTMQRICKSLRTVSETQLSGAGFSDIEFQKGSIQNFPIMSRGNSQNALSDSDVNSMEGMILNIPDQKNEGIEADIPCEQAVGGPRRQMEKKRNTAEKNVSLSVLQQYFSGSLKDAAKSIGVCPTTLKRICRQHGISRWPSRKINKVNRSLRKIQSVLDSVKGVEGGLKFDPTTGEFMATASVIQDFDTQKNLLFPEKIQSMRNPELITQHAVQATTVPFTEGEDFVIKLEEDEYCVGGNIPIQNSCETESKKLNTPILNSNGSSKPISIDTGSNQPCSFVTRLQNCPENAFLPSYIVKGVKQLSQNKYSMKLENSDWHFASRSSSSMAAADEMDAGGDDDDGILEHNQPTSSSMTDSSNGSGSMVNDCSSGSQGFDEHKHPKGKRNCVDGESKITVKATYKEDTIRFKFEPSAGCFQLYEEVARRFKLQNGTFQLKYLDDEEEWVMLVSESDLQECLEILDDIGTRTVKFQVRDKPCGLSSSGSSNCFLTGSS

SEQ ID NO: 378 - protein, 959 aa, Arabidopsis thaliana
MCEPDDNSARNGVTTQPSRSRELLMDVDDLDLDGSWPLDQIPYLSSSNRMISPIFVSSSSEQPCSPLWAFSDGGGNGFHHATSGGDDEKISSVSGVPSFRLAEYPLFLPYSSPSAAENTTEKHNSFQFPSPLMSLVPPENTDNYCVIKERMTQALRYFKESTEQHVLAQVWAPVRKNGRDLLTTLGQPFVLNPNGNGLNQYRMISLTYMFSVDSESDVELGLPGRVFRQKLPEWTPNVQYYSSKEFSRLDHALHYNVRGTLALPVFNPSGQSCIGVVELIMTSEKIHYAPEVDKVCKALEAVNLKSSEILDHQTTQICNESRQNALAEILEVLTVVCETHNLPLAQTWVPCQHGSVLANGGGLKKNCTSFDGSCMGQICMSTTDMACYVVDAHVWGFRDACLEHHLQKGQGVAGRAFLNGGSCFCRDITKFCKTQYPLVHYALMFKLTTCFAISLQSSYTGDDSYILEFFLPSSITDDQEQDLLLGSILVTMKEHFQSLRVASGVDFGEDDDKLSFEIIQALPDKKVHSKIESIRVPFSGFKSNATETMLIPQPVVQSSDPVNEKINVATVNGVVKEKKKTEKKRGKTEKTISLDVLQQYFTGSLKDAAKSLGVCPTTMKRICRQHGISRWPSRKIKKVNRSITKLKRVIESVQGTDGGLDLTSMAVSSIPWTHGQTSAQPLNSPNGSKPPELPNTNNSPNHWSSDHSPNEPNGSPELPPSNGHKRSRTVDESAGTPTSHGSCDGNQLDEPKVPNQDPLFTVGGSPGLLFPPYSRDHDVSAASFAMPNRLLGSIDHFRGMLIEDAGSSKDLRNLCPTAAFDDKFQDTNWMNNDNNSNNNLYAPPKEEAIANVACEPSGSEMRTVTIKASYKDDIIRFRISSGSGIMELKDEVAKRLKVDAGTFDIKYLDDDNEWVLIACDADLQECLEIPRSSRTKIVRLLVHDVTTNLGSSCESTGEL

SEQ ID NO: 379 - protein, 841 aa, Arabidopsis thaliana
MELDDLDLSGSWPLDQITFASNFKSPVIFSSSEQPFSPLWSFSETSGDVGGELYSAAVAPTRFTDYSVLLASSESETTTKENNQVPSPSWGIMPLENPDSYCAIKAKMTQALRYFKESTGQQHVLAQVWAPVKNRGRYVLTTSGQPFVLGPNSNGLNQYRMVSLTYMFSLDGERDGELGLPGRVFRKKLPEWTPNVQYYSSKEFSRLGHALHYNVQGTLALPVFEPSRQLCVGVVELIMTSPKINYAPEVEKVCKALEAVNLKTSEILNHETTQICNEGRQNALAEILEILTVVCETYKLPLAQTWVPCRHRSVLAFGGGFKKSCSSFDGSCMGKVCMSTSDLAVYVVDAHVWGFRDACAEHHLQKGQGVAGRAFQSGNLCFCRDVTRFCKTDYPLVHYARMFKLTSCFAVCLKSTYTGDDEYVLEFFLPPAITDKSEQDCLLGSLLQTMKQHYSSLKVVSETELCENNMSLEVVEASEDGMVYSKLEPIRIHHPAQISKDYLELNAPEQKVSLNSDFMENNEVDDGVERFQTLDPIPEAKTVKKSERKRGKTEKTISLEVLQQYFAGSLKDAAKSLGVCPTTMKRICRQHGISRWPSRKINKVNRSLTRLKHVIDSVQGADGSLNLTSLSPRPWPHQIPPIDIQLAKNCPPTSTSPLSNLQDVKIENRDAEDSAGSSTSRASCKVNPICETRFRLPTHNQEPSRQVALDDSDSSSKNMTNFWAHLTCQDTASPTILQHKLVSIKATYREDIIRFKISPESVSITELKQQVAKRLKLETAAFELKYLDDDREWVSVSCDADLSECLDTSAAKANTLRLSVHDVTFNFGSSCESSEETMMCL

SEQ ID NO: 380 - protein, 967 aa, Arachis duranensis
MSESEEDKTDFASLKSKEDQQQSPPQLPPPSAMDFDLDLETSWPLDHLSFVSNNPMSPFLFPISSEQPSSPLWLFSDAEDERHNNTLASAPAFSDFHKIFSCDSNSVTEKPVENANDEDKKLLPPIVAMPPLEILDRYCVIKERMTQALRYYKELTEQNVLAQVWAPVRNGNRFVLTTSGQPFVLDPHSNGLHQYRTVSLMYVFSADGEKEESLGLPGRVYQQKVPEWTPDVQYYSTKEYPRRDHAQHYNVRGTLALPVFEPSMQSCVGVLELIMTSQKINYAPEVDKICRALEAVNLKSSEILGHQYTQICNEGRQNALAEILEILTVVCETHNLPLAQTWVPCRHRSVLAHGGGLKKSCSSFDGSCMGKVCMSTTDIAFYIIDAHLWGFREACVEHHLQQGQGVAGRAFSSHSMSFCRNITRFCKIDYPLVHYALMFGLTSSFSICLRSSHTGDDDYVLEFFLPPRITDFNEQKALLGSILTIMKQHFQSLKIASGVELEQNALVETIEATIEGVHLRFESIPVRQDASPNVREELAQDPSLQKIMMGCNDGGSIGDQIPSLETKNTNKPSERKRGKTEKSISLEVLQRYFAGSLKDAAKSLGVCPTTMKRICRQHGISRWPSRKINKVNRSLSKLKRVIESVQGAEGAFALNPLSTSPLPFPEHSTPNKFSQQASPTEPQIRENELDASKVLETTRIARAQCLEKMVNDKSGSIREVGKETKGPRAKSCSSADSTNPTSHGSCHGSPPIESSPVKDIFITSNNDQCVGLRSPEATMQPPNNTLSYPTTCTMPDMVATELQEPFGGMLVEDAGSSKDLRNLCPSVAEAIVEDMAPEPCRTNPPFSGLAPKQCMDPLKETVTPFAARIEMKTVTIKATYREDIIRFRVSLNCGIVELKEEVAKRLKLEVGTFDIKYLDDDHEWVLIACDADLQECIDVSRSSASNIIRVLVHEITSNLGSSCESSG

SEQ ID NO: 381 - protein, 986 aa, Arachis duranensis
MPDSCEEKSELPSKSKPQEEHGFPMDFDIYLESSSWPMDHTPSASNPMSPFIITTSSEQPFSPLWAFSDVEDDHRHVRVVAGDNTNTNTAIETENPVENDDNKKIVSPPFVPLPPIKIPDGYCLIKERMTQALRHFKQLTEQNFLAQVWAPVRNGNRYALTTSGQPFVLDPHSNGLHQYRTVSLMYMFPVDGENDEILGLPGRVFQQKLPEWTPNVQYYTSREYSRRNHAQHYNVRGTLALPVFESPGQSCVGVLELIMTSEKVNYAPEVDKVCKALEAVNLRSSEILEHPFAQICNEGRQNALAEILEILTVVCETHNLPLAQTWVPCRHRSVLANGGGLKKSCSSFDGHCMGRVCMSASDVAFYVIDAHTWGFHDACAEHHLQQGQGVAGRAFLSHNMSFCGNITQFCKTDYPLVHYALMFGLTSCFAICLQSSHTGSDDYVLEFFLPPSITNFYEQKDLLGSILATMKQNFQSLKVAAGVELEEGCTIEVVEPINERIHLSLESVPVAQSAKSPPPTLNASLNKDDGVPQGPLEQQMPAWLEDINDGGNLGDNAGGSMNPMTSLDAKIKKKPSERKRGKAEKMISLEVLQRYFSGSLKDAAKSLGVCPTTMKRICRQHGISRWPSRKINKVNRSLSKLKCVIESVRGAEGAFALNSVNKDPLPIAAGSFTEPCTSKMFNRNASLSIQPSKTRMNENDLDTSRVSETNRQVRMQDQLLEGEQSPEKVIHEEGWSTQEVGTKDPEKFRNLSGSSEDSANPHSHNSCHGSPPNEISPANIFRPFNKEKSVPLGVSTESTMQPTNALNYANAYTALNVERTEPQEPFGRMLLEGVGSSKDLRNLCPLEDQALEACGVNPPCHDLAPKQCMMDTTLNSNNTMIPFAPKKEMKSVTIKATYKEDIIRFRVFLNCGIVELQEEISKRLKLEIGAFDIKYLDDDNEWVLISCDADLQECMDVLTSSGSNMIRLVVHDTVSILGSSCESSGN

SEQ ID NO: 382 - protein, 899 aa, Arachis duranensis
MQKMKGTTTLLLQLQLSLISTRYSLTSYDVEVKGDSNSVTEKPVENANDEDKKLLPPIVAMPPLEILDRYCVIKERMTQALRYYKELTEQNVLAQVWAPVRNGNRFVLTTSGQPFVLDPHSNGLHQYRTVSLMYVFSADGEKEESLGLPGRVYQQKVPEWTPDVQYYSTKEYPRRDHAQHYNVRGTLALPVFEPSMQSCVGVLELIMTSQKINYAPEVDKICRALEAVNLKSSEILGHQYTQICNEGRQNALAEILEILTVVCETHNLPLAQTWVPCRHRSVLAHGGGLKKSCSSFDGSCMGKVCMSTTDIAFYIIDAHLWGFREACVEHHLQQGQGVAGRAFSSHSMSFCRNITRFCKIDYPLVHYALMFGLTSSFSICLRSSHTGDDDYVLEFFLPPRITDFNEQKALLGSILTIMKQHFQSLKIASGVELEQNALVETIEATIEGVHLRFESIPVRQDASPNVREELAQDPSLQKIMMGCNDGGSIGDQIPSLETKNTNKPSERKRGKTEKSISLEVLQRYFAGSLKDAAKSLGVCPTTMKRICRQHGISRWPSRKINKVNRSLSKLKRVIESVQGAEGAFALNPLSTSPLPFPEHSTPNKFSQQASPTEPQIRENELDASKVLETTRIARAQCLEKMVNDKSGSIREVGKETKGPRAKSCSSADSTNPTSHGSCHGSPPIESSPVKDIFITSNNDQCVGLRSPEATMQPPNNTLSYPTTCTMPDMVATELQEPFGGMLVEDAGSSKDLRNLCPSVAEAIVEDMAPEPCRTNPPFSGLAPKQCMDPLKETVTPFAARIEMKTVTIKATYREDIIRFRVSLNCGIVELKEEVAKRLKLEVGTFDIKYLDDDHEWVLIACDADLQECIDVSRSSASNIIRVLVHEITSNLGSSCESSG

SEQ ID NO: 383 - protein, 839 aa, Arachis duranensis
MPPLEILDRYCVIKERMTQALRYYKELTEQNVLAQVWAPVRNGNRFVLTTSGQPFVLDPHSNGLHQYRTVSLMYVFSADGEKEESLGLPGRVYQQKVPEWTPDVQYYSTKEYPRRDHAQHYNVRGTLALPVFEPSMQSCVGVLELIMTSQKINYAPEVDKICRALEAVNLKSSEILGHQYTQICNEGRQNALAEILEILTVVCETHNLPLAQTWVPCRHRSVLAHGGGLKKSCSSFDGSCMGKVCMSTTDIAFYIIDAHLWGFREACVEHHLQQGQGVAGRAFSSHSMSFCRNITRFCKIDYPLVHYALMFGLTSSFSICLRSSHTGDDDYVLEFFLPPRITDFNEQKALLGSILTIMKQHFQSLKIASGVELEQNALVETIEATIEGVHLRFESIPVRQDASPNVREELAQDPSLQKIMMGCNDGGSIGDQIPSLETKNTNKPSERKRGKTEKSISLEVLQRYFAGSLKDAAKSLGVCPTTMKRICRQHGISRWPSRKINKVNRSLSKLKRVIESVQGAEGAFALNPLSTSPLPFPEHSTPNKFSQQASPTEPQIRENELDASKVLETTRIARAQCLEKMVNDKSGSIREVGKETKGPRAKSCSSADSTNPTSHGSCHGSPPIESSPVKDIFITSNNDQCVGLRSPEATMQPPNNTLSYPTTCTMPDMVATELQEPFGGMLVEDAGSSKDLRNLCPSVAEAIVEDMAPEPCRTNPPFSGLAPKQCMDPLKETVTPFAARIEMKTVTIKATYREDIIRFRVSLNCGIVELKEEVAKRLKLEVGTFDIKYLDDDHEWVLIACDADLQECIDVSRSSASNIIRVLVHEITSNLGSSCESSG

SEQ ID NO: 384 - protein, 937 aa, Arachis duranensis
MLKMITGMSGLLQVQLSLRPWIHLLFHVIFWFCDNTNTNTAIETENPVENDDNKKIVSPPFVPLPPIKIPDGYCLIKERMTQALRHFKQLTEQNFLAQVWAPVRNGNRYALTTSGQPFVLDPHSNGLHQYRTVSLMYMFPVDGENDEILGLPGRVFQQKLPEWTPNVQYYTSREYSRRNHAQHYNVRGTLALPVFESPGQSCVGVLELIMTSEKVNYAPEVDKVCKALEAVNLRSSEILEHPFAQICNEGRQNALAEILEILTVVCETHNLPLAQTWVPCRHRSVLANGGGLKKSCSSFDGHCMGRVCMSASDVAFYVIDAHTWGFHDACAEHHLQQGQGVAGRAFLSHNMSFCGNITQFCKTDYPLVHYALMFGLTSCFAICLQSSHTGSDDYVLEFFLPPSITNFYEQKDLLGSILATMKQNFQSLKVAAGVELEEGCTIEVVEPINERIHLSLESVPVAQSAKSPPPTLNASLNKDDGVPQGPLEQQMPAWLEDINDGGNLGDNAGGSMNPMTSLDAKIKKKPSERKRGKAEKMISLEVLQRYFSGSLKDAAKSLGVCPTTMKRICRQHGISRWPSRKINKVNRSLSKLKCVIESVRGAEGAFALNSVNKDPLPIAAGSFTEPCTSKMFNRNASLSIQPSKTRMNENDLDTSRVSETNRQVRMQDQLLEGEQSPEKVIHEEGWSTQEVGTKDPEKFRNLSGSSEDSANPHSHNSCHGSPPNEISPANIFRPFNKEKSVPLGVSTESTMQPTNALNYANAYTALNVERTEPQEPFGRMLLEGVGSSKDLRNLCPLEDQALEACGVNPPCHDLAPKQCMMDTTLNSNNTMIPFAPKKEMKSVTIKATYKEDIIRFRVFLNCGIVELQEEISKRLKLEIGAFDIKYLDDDNEWVLISCDADLQECMDVLTSSGSNMIRLVVHDTVSILGSSCESSGN

SEQ ID NO: 385 - protein, 852 aa, Arachis duranensis
MLKMITGMSGLLQVWAPVRNGNRYALTTSGQPFVLDPHSNGLHQYRTVSLMYMFPVDGENDEILGLPGRVFQQKLPEWTPNVQYYTSREYSRRNHAQHYNVRGTLALPVFESPGQSCVGVLELIMTSEKVNYAPEVDKVCKALEAVNLRSSEILEHPFAQICNEGRQNALAEILEILTVVCETHNLPLAQTWVPCRHRSVLANGGGLKKSCSSFDGHCMGRVCMSASDVAFYVIDAHTWGFHDACAEHHLQQGQGVAGRAFLSHNMSFCGNITQFCKTDYPLVHYALMFGLTSCFAICLQSSHTGSDDYVLEFFLPPSITNFYEQKDLLGSILATMKQNFQSLKVAAGVELEEGCTIEVVEPINERIHLSLESVPVAQSAKSPPPTLNASLNKDDGVPQGPLEQQMPAWLEDINDGGNLGDNAGGSMNPMTSLDAKIKKKPSERKRGKAEKMISLEVLQRYFSGSLKDAAKSLGVCPTTMKRICRQHGISRWPSRKINKVNRSLSKLKCVIESVRGAEGAFALNSVNKDPLPIAAGSFTEPCTSKMFNRNASLSIQPSKTRMNENDLDTSRVSETNRQVRMQDQLLEGEQSPEKVIHEEGWSTQEVGTKDPEKFRNLSGSSEDSANPHSHNSCHGSPPNEISPANIFRPFNKEKSVPLGVSTESTMQPTNALNYANAYTALNVERTEPQEPFGRMLLEGVGSSKDLRNLCPLEDQALEACGVNPPCHDLAPKQCMMDTTLNSNNTMIPFAPKKEMKSVTIKATYKEDIIRFRVFLNCGIVELQEEISKRLKLEIGAFDIKYLDDDNEWVLISCDADLQECMDVLTSSGSNMIRLVVHDTVSILGSSCESSGN

SEQ ID NO: 386 - protein, 845 aa, Arachis duranensis
MLFFGFVWAPVRNGNRYALTTSGQPFVLDPHSNGLHQYRTVSLMYMFPVDGENDEILGLPGRVFQQKLPEWTPNVQYYTSREYSRRNHAQHYNVRGTLALPVFESPGQSCVGVLELIMTSEKVNYAPEVDKVCKALEAVNLRSSEILEHPFAQICNEGRQNALAEILEILTVVCETHNLPLAQTWVPCRHRSVLANGGGLKKSCSSFDGHCMGRVCMSASDVAFYVIDAHTWGFHDACAEHHLQQGQGVAGRAFLSHNMSFCGNITQFCKTDYPLVHYALMFGLTSCFAICLQSSHTGSDDYVLEFFLPPSITNFYEQKDLLGSILATMKQNFQSLKVAAGVELEEGCTIEVVEPINERIHLSLESVPVAQSAKSPPPTLNASLNKDDGVPQGPLEQQMPAWLEDINDGGNLGDNAGGSMNPMTSLDAKIKKKPSERKRGKAEKMISLEVLQRYFSGSLKDAAKSLGVCPTTMKRICRQHGISRWPSRKINKVNRSLSKLKCVIESVRGAEGAFALNSVNKDPLPIAAGSFTEPCTSKMFNRNASLSIQPSKTRMNENDLDTSRVSETNRQVRMQDQLLEGEQSPEKVIHEEGWSTQEVGTKDPEKFRNLSGSSEDSANPHSHNSCHGSPPNEISPANIFRPFNKEKSVPLGVSTESTMQPTNALNYANAYTALNVERTEPQEPFGRMLLEGVGSSKDLRNLCPLEDQALEACGVNPPCHDLAPKQCMMDTTLNSNNTMIPFAPKKEMKSVTIKATYKEDIIRFRVFLNCGIVELQEEISKRLKLEIGAFDIKYLDDDNEWVLISCDADLQECMDVLTSSGSNMIRLVVHDTVSILGSSCESSGN

SEQ ID NO: 387 - protein, 967 aa, Arachis hypogaea
MSESEEDKTDFASLKSKEDQQQSPPQLPPPSAMDFDLDLETSWPLDHLSFVSNNPMSPFLFPISSEQPSSPLWLFSDAEDERHNNTLASAPAFSDFHKIFSCDSNSVTEKPVENANDEDKKLLPPIVAMPPLEILDRYCVIKERMTQALRYYKELTEQNVLAQVWAPVRNGNRFVLTTSGQPFVLDPHSNGLHQYRTVSLMYVFSADGEKEESLGLPGRVYQQKVPEWTPDVQYYSTKEYPRRDHAQHYNVRGTLALPVFEPSMQSCVGVLELIMTSQKINYAPEVDKICRALEAVNLKSSEILGHQYAQICNEGRQNALAEILEILTVVCETHNLPLAQTWVPCRHRSVLAHGGGLKKSCSSFDGSCMGKVCMSTTDIAFYIIDAHLWGFREACVEHHLQQGQGVAGRAFSSHSMSFCRNITRFCKIDYPLVHYALMFGLTSSFSICLRSSHTGDDDYVLEFFLPPRITDFNEQKALLGSILTIMKQHFQSLKIASGVELEQNALVETIEATIEGVHLRFESIPVRQDASPNVREELAQDPSLQKIMMGCNDGGSIGDQIPSLETKNTNKPSERKRGKTEKSISLEVLQRYFAGSLKDAAKSLGVCPTTMKRICRQHGISRWPSRKINKVNRSLSKLKRVIESVQGAEGAFALNPLSTSPLPFPEHSTPNKFSQQASPTEPQIRENELDASKVLETTRIARAQCLEKMVNDKSGSIREVGKETKGPRAKSCSSADSTNPTSHGSCHGSPPIESSPVKDIFITSNNDQCVGLRSPEATMQPPNNTLSYPTTCTMPDMVATELQEPFGGMLVEDAGSSKDLRNLCPSVAEAIVEDMAPEPCRTNPPFSGLAPKQCMDPLKETVTPFAARIEMKTVTIKATYREDIIRFRVSLNCGIVELKEEVAKRLKLEVGTFDIKYLDDDHEWVLIACDADLQECIDVSRSSASNIIRVLVHEITSNLGSSCESSG

SEQ ID NO: 388 - protein, 986 aa, Arachis hypogaea
MPDSCEEKSELPSKSKPQEEHGFPMDFDIYLESSSWPMDHTPSASNPMSPFIITTSSEQPFSPLWAFSDVEDDHRHVRVVAGDNTNTNTAIETENPVENDDNKKIVSPHFVPLPPIKIPDGYCLIKERMTQALRHFKQLTEQNFLAQVWAPVRNGNRYALTTSGQPFVLDPHSNGLHQYRTVSLMYMFPVDGENDEILGLPGRVFQQKLPEWTPNVQYYTSREYSRRNHAQHYNVRGTLALPVFESPGQSCVGVLELIMTSEKVNYAPEVDKVCKALEAVNLRSSEILEHPFAQICNEGRQNALAEILEILTVVCETHNLPLAQTWVPCRHRSVLANGGGLKKSCSSFDGHCMGRVCMSASDVAFYVIDAHTWGFHDACAEHHLQQGQGVAGRAFLSHNMSFCGNITQFCKTDYPLVHYALMFGLTSCFAICLQSSHTGSDDYVLEFFLPPSVTNFYEQKDLLGSILATMKQNFQSLKVAAGVELEEGCTIEVVEPINERIHLSLESVPVAQSAKSPPPTLNASLNKDDGVPQGPLEQQMPAWLEDINDGGNLGDNAGGSMNPMTSLDAKIKKKPSERKRGKAEKMISLEVLQRYFSGSLKDAAKSLGVCPTTMKRICRQHGISRWPSRKINKVNRSLSKLKCVIESVRGAEGAFALNSVNKDPLPIAAGSFTEPCTSKMFNRNASLSIQPSKTQMNENDLDTSRVSETNRQVRMQDQLLEGEQSPEKVIHEEGWSTQEVGTKDPEKFRNLSGSSEDSANPHSHDSCHGSPPNEISPANIFRPFNKEKSVPLRVSAESTMQPTNALNYANAYTALNVERTEPQEPFGRMLLEGVGSSKDLRNLCPLEDQALEACGVNPPCHDLAPKQCMMDTTLNSNNTMIPFAPKKETKSVTIKATYKEDIIRFRVSLNCGIVELQEEISKRLKLEIGAFDIKYLDDDNEWVLISCDADLQECMDVLTSSGSNMIRLVVHDTVSILGSSCESSGN

SEQ ID NO: 389 - protein, 930 aa, Arachis hypogaea
MSGLLQVQLSLRPWIHLLFHVIFWFCDNTNTNTAIETENPVENDDNKKIVSPHFVPLPPIKIPDGYCLIKERMTQALRHFKQLTEQNFLAQVWAPVRNGNRYALTTSGQPFVLDPHSNGLHQYRTVSLMYMFPVDGENDEILGLPGRVFQQKLPEWTPNVQYYTSREYSRRNHAQHYNVRGTLALPVFESPGQSCVGVLELIMTSEKVNYAPEVDKVCKALEAVNLRSSEILEHPFAQICNEGRQNALAEILEILTVVCETHNLPLAQTWVPCRHRSVLANGGGLKKSCSSFDGHCMGRVCMSASDVAFYVIDAHTWGFHDACAEHHLQQGQGVAGRAFLSHNMSFCGNITQFCKTDYPLVHYALMFGLTSCFAICLQSSHTGSDDYVLEFFLPPSVTNFYEQKDLLGSILATMKQNFQSLKVAAGVELEEGCTIEVVEPINERIHLSLESVPVAQSAKSPPPTLNASLNKDDGVPQGPLEQQMPAWLEDINDGGNLGDNAGGSMNPMTSLDAKIKKKPSERKRGKAEKMISLEVLQRYFSGSLKDAAKSLGVCPTTMKRICRQHGISRWPSRKINKVNRSLSKLKCVIESVRGAEGAFALNSVNKDPLPIAAGSFTEPCTSKMFNRNASLSIQPSKTQMNENDLDTSRVSETNRQVRMQDQLLEGEQSPEKVIHEEGWSTQEVGTKDPEKFRNLSGSSEDSANPHSHDSCHGSPPNEISPANIFRPFNKEKSVPLRVSAESTMQPTNALNYANAYTALNVERTEPQEPFGRMLLEGVGSSKDLRNLCPLEDQALEACGVNPPCHDLAPKQCMMDTTLNSNNTMIPFAPKKETKSVTIKATYKEDIIRFRVSLNCGIVELQEEISKRLKLEIGAFDIKYLDDDNEWVLISCDADLQECMDVLTSSGSNMIRLVVHDTVSILGSSCESSGN

SEQ ID NO: 390 - protein, 852 aa, Arachis hypogaea
MLKMITGMSGLLQVWAPVRNGNRYALTTSGQPFVLDPHSNGLHQYRTVSLMYMFPVDGENDEILGLPGRVFQQKLPEWTPNVQYYTSREYSRRNHAQHYNVRGTLALPVFESPGQSCVGVLELIMTSEKVNYAPEVDKVCKALEAVNLRSSEILEHPFAQICNEGRQNALAEILEILTVVCETHNLPLAQTWVPCRHRSVLANGGGLKKSCSSFDGHCMGRVCMSASDVAFYVIDAHTWGFHDACAEHHLQQGQGVAGRAFLSHNMSFCGNITQFCKTDYPLVHYALMFGLTSCFAICLQSSHTGSDDYVLEFFLPPSVTNFYEQKDLLGSILATMKQNFQSLKVAAGVELEEGCTIEVVEPINERIHLSLESVPVAQSAKSPPPTLNASLNKDDGVPQGPLEQQMPAWLEDINDGGNLGDNAGGSMNPMTSLDAKIKKKPSERKRGKAEKMISLEVLQRYFSGSLKDAAKSLGVCPTTMKRICRQHGISRWPSRKINKVNRSLSKLKCVIESVRGAEGAFALNSVNKDPLPIAAGSFTEPCTSKMFNRNASLSIQPSKTQMNENDLDTSRVSETNRQVRMQDQLLEGEQSPEKVIHEEGWSTQEVGTKDPEKFRNLSGSSEDSANPHSHDSCHGSPPNEISPANIFRPFNKEKSVPLRVSAESTMQPTNALNYANAYTALNVERTEPQEPFGRMLLEGVGSSKDLRNLCPLEDQALEACGVNPPCHDLAPKQCMMDTTLNSNNTMIPFAPKKETKSVTIKATYKEDIIRFRVSLNCGIVELQEEISKRLKLEIGAFDIKYLDDDNEWVLISCDADLQECMDVLTSSGSNMIRLVVHDTVSILGSSCESSGN

SEQ ID NO: 391 - protein, 845 aa, Arachis hypogaea
MLFFGFVWAPVRNGNRYALTTSGQPFVLDPHSNGLHQYRTVSLMYMFPVDGENDEILGLPGRVFQQKLPEWTPNVQYYTSREYSRRNHAQHYNVRGTLALPVFESPGQSCVGVLELIMTSEKVNYAPEVDKVCKALEAVNLRSSEILEHPFAQICNEGRQNALAEILEILTVVCETHNLPLAQTWVPCRHRSVLANGGGLKKSCSSFDGHCMGRVCMSASDVAFYVIDAHTWGFHDACAEHHLQQGQGVAGRAFLSHNMSFCGNITQFCKTDYPLVHYALMFGLTSCFAICLQSSHTGSDDYVLEFFLPPSVTNFYEQKDLLGSILATMKQNFQSLKVAAGVELEEGCTIEVVEPINERIHLSLESVPVAQSAKSPPPTLNASLNKDDGVPQGPLEQQMPAWLEDINDGGNLGDNAGGSMNPMTSLDAKIKKKPSERKRGKAEKMISLEVLQRYFSGSLKDAAKSLGVCPTTMKRICRQHGISRWPSRKINKVNRSLSKLKCVIESVRGAEGAFALNSVNKDPLPIAAGSFTEPCTSKMFNRNASLSIQPSKTQMNENDLDTSRVSETNRQVRMQDQLLEGEQSPEKVIHEEGWSTQEVGTKDPEKFRNLSGSSEDSANPHSHDSCHGSPPNEISPANIFRPFNKEKSVPLRVSAESTMQPTNALNYANAYTALNVERTEPQEPFGRMLLEGVGSSKDLRNLCPLEDQALEACGVNPPCHDLAPKQCMMDTTLNSNNTMIPFAPKKETKSVTIKATYKEDIIRFRVSLNCGIVELQEEISKRLKLEIGAFDIKYLDDDNEWVLISCDADLQECMDVLTSSGSNMIRLVVHDTVSILGSSCESSGN

SEQ ID NO: 392 - protein, 969 aa, Arachis ipaensis
MSESEEDKTDFASPKSKEEQQQQSPPQLPPPSAMDFDLDLETSWPLDHLSFVSNNPMSPFLFPISSEQPSSPLWLFSDAEDERHNNTLASAPAFSDFHKIFSCDSNSVTEKPVENANDEDKKLLPPIVAMPPLEILDRYCVIKERMTQALRYFKELTEQNVLAQVWAPVRNGNRFVLTTSGQPFVLDPHSNGLHQYRTVSLMYVFSADGEKEESLGLPGRVYQQKVPEWTPDVQYYSTKEYPRRDHAQHYNVRGTLALPVFEPSMQSCVGVLELIMTSQKINYAPEVDKICRALEAVNLKSSEILGHQYTQICNEGRQNALAEILEILTVVCETHNLPLAQTWVPCRHRSVLAHGGGLKKSCSSFDGSCMGKVCMSTTDIAFYIIDAHLWGFREACVEHHLQQGQGVAGRAFSSHSMSFCRNITRFCKIDYPLVHYALMFGLTSSFSICLRSSHTGDDDYVLEFFLPPRITDFNEQKALLGSILTIMKQHFQSLKIASGVELEQNALVETIEATIEGVHLRFESIPVRQDASPNVREELAQDPSLQKIMMGCNDGGSIGDQIPSLETKNTNKPSERKRGKTEKSISLEVLQRYFAGSLKDAAKSLGVCPTTMKRICRQHGISRWPSRKINKVNRSLSKLKRVIESVQGAEGAFTLNPLSTSPLPFPEHSTPNKFSQQASPTEPQIRENELDASKVLETTRIARAQCLEKMVNDKSGSIREVGKETKGPRAKSCSSADSTNPTSHGSCHGSPPIESSPVKDIFITSNNDQCVGLRSPEATMQPPNNTLSYPTTCAMPDMVATELQEPFGGMLVEDAGSSKDLRNLCPSVAEAIVEDMAPEPCRTNPPFSGLAPKQCMDPLKETVTPFASRKEMKTVTIKATYREDIIRFRVSLNCGIVELKEEVAKRLKLEVGTFDIKYLDDDHEWVLIACDADLQECIDVSRSSASNIIRVLVHEITSHLGSSCESSGE

SEQ ID NO: 393 - protein, 984 aa, Arachis ipaensis
MPDSCEEKSELPSKSKPQEEHGFPMDFDIYLESSSWPMDHTPSASNPMSPFIITTSSEQPFSPLWAFSDVEDDHRHVRVVAGDNTNTAIETENPVENDDNKKIVSPPFVPLPPIKIPDGYCLIKERMTQALRHFKQLTEQNFLAQVWAPVRNGNRYALTTSGQPFVLDPHSNGLHQYRTVSLMYMFPVDGENDEILGLPGRVFQQKLPEWTPNVQYYTSREYSRRNHAQHYNVRGTLALPVFESPGQSCVGVLELIMTSEKVNYAPEVDKVCKALEAVNLRSSEILEHPFAQICNEGRQNALAEILEILTVVCETHNLPLAQTWVPCRHRSVLANGGGLKKSCSSFDGHCMGRVCMSASDVAFYVIDAHTWGFHDACAEHHLQQGQGVAGRAFLSHNMSFCGNITQFCKTDYPLVHYALMFGLTSCFAICLQSSHTGSDDYVLEFFLPPSITNFYEQKDLLGSILATMKQNFQSLKVAAGVELEEGCTIEVVEPINERIHLSLESVPVAQSAKSPQPTLNASLNKDDGVPQGPLEQQMPAWLDDINDGGNLGDNAGGSTNLMTSLEAKIKKKPSERKRGKAEKMISLEVLQRYFSGSLKDAAKSLGVCPTTMKRICRQHGISRWPSRKINKVNRSLSKLKCVIESVQGAEGAFALNSVNKDPLPIAAGSFTEPCTSKMFNRNASLSIQPSKTQINENDLDTSRVSETNRQVRMQDQFLEGEQSPEKVIHEEGWSTQEVGTKDPEKFRNLSGSSEDSANPHSHDSCHGSPPNEISPANIFRPFNKEKSVPLRVSAESTMQPTNALNYANAYTALNVERTEPQEPFGRMLLEGVGSSKDLRNLCPLEDQALEACGVNPPCHDLAPKQCMMDITLNSNNTMIPFATKKEMKSVTIKATYKEDIIRFRVSLNCGIVELQEEISKRLKLEIGAFDIKYLDDDNEWVLISCDADLQECMDVLTSSGSNMIRLVVHDTVSILGSSCESSGN

SEQ ID NO: 394 - protein, 845 aa, Arachis ipaensis
MLFFGFVWAPVRNGNRYALTTSGQPFVLDPHSNGLHQYRTVSLMYMFPVDGENDEILGLPGRVFQQKLPEWTPNVQYYTSREYSRRNHAQHYNVRGTLALPVFESPGQSCVGVLELIMTSEKVNYAPEVDKVCKALEAVNLRSSEILEHPFAQICNEGRQNALAEILEILTVVCETHNLPLAQTWVPCRHRSVLANGGGLKKSCSSFDGHCMGRVCMSASDVAFYVIDAHTWGFHDACAEHHLQQGQGVAGRAFLSHNMSFCGNITQFCKTDYPLVHYALMFGLTSCFAICLQSSHTGSDDYVLEFFLPPSITNFYEQKDLLGSILATMKQNFQSLKVAAGVELEEGCTIEVVEPINERIHLSLESVPVAQSAKSPQPTLNASLNKDDGVPQGPLEQQMPAWLDDINDGGNLGDNAGGSTNLMTSLEAKIKKKPSERKRGKAEKMISLEVLQRYFSGSLKDAAKSLGVCPTTMKRICRQHGISRWPSRKINKVNRSLSKLKCVIESVQGAEGAFALNSVNKDPLPIAAGSFTEPCTSKMFNRNASLSIQPSKTQINENDLDTSRVSETNRQVRMQDQFLEGEQSPEKVIHEEGWSTQEVGTKDPEKFRNLSGSSEDSANPHSHDSCHGSPPNEISPANIFRPFNKEKSVPLRVSAESTMQPTNALNYANAYTALNVERTEPQEPFGRMLLEGVGSSKDLRNLCPLEDQALEACGVNPPCHDLAPKQCMMDITLNSNNTMIPFATKKEMKSVTIKATYKEDIIRFRVSLNCGIVELQEEISKRLKLEIGAFDIKYLDDDNEWVLISCDADLQECMDVLTSSGSNMIRLVVHDTVSILGSSCESSGN

SEQ ID NO: 395 - protein, 852 aa, Arachis ipaensis
MLKMITGMSGLLQVWAPVRNGNRYALTTSGQPFVLDPHSNGLHQYRTVSLMYMFPVDGENDEILGLPGRVFQQKLPEWTPNVQYYTSREYSRRNHAQHYNVRGTLALPVFESPGQSCVGVLELIMTSEKVNYAPEVDKVCKALEAVNLRSSEILEHPFAQICNEGRQNALAEILEILTVVCETHNLPLAQTWVPCRHRSVLANGGGLKKSCSSFDGHCMGRVCMSASDVAFYVIDAHTWGFHDACAEHHLQQGQGVAGRAFLSHNMSFCGNITQFCKTDYPLVHYALMFGLTSCFAICLQSSHTGSDDYVLEFFLPPSITNFYEQKDLLGSILATMKQNFQSLKVAAGVELEEGCTIEVVEPINERIHLSLESVPVAQSAKSPQPTLNASLNKDDGVPQGPLEQQMPAWLDDINDGGNLGDNAGGSTNLMTSLEAKIKKKPSERKRGKAEKMISLEVLQRYFSGSLKDAAKSLGVCPTTMKRICRQHGISRWPSRKINKVNRSLSKLKCVIESVQGAEGAFALNSVNKDPLPIAAGSFTEPCTSKMFNRNASLSIQPSKTQINENDLDTSRVSETNRQVRMQDQFLEGEQSPEKVIHEEGWSTQEVGTKDPEKFRNLSGSSEDSANPHSHDSCHGSPPNEISPANIFRPFNKEKSVPLRVSAESTMQPTNALNYANAYTALNVERTEPQEPFGRMLLEGVGSSKDLRNLCPLEDQALEACGVNPPCHDLAPKQCMMDITLNSNNTMIPFATKKEMKSVTIKATYKEDIIRFRVSLNCGIVELQEEISKRLKLEIGAFDIKYLDDDNEWVLISCDADLQECMDVLTSSGSNMIRLVVHDTVSILGSSCESSGN

SEQ ID NO: 396 - protein, 900 aa, Arachis ipaensis
MQKMKGTTTLLLQLQLSLISTRYSLTSYDVEVKGDSNSVTEKPVENANDEDKKLLPPIVAMPPLEILDRYCVIKERMTQALRYFKELTEQNVLAQVWAPVRNGNRFVLTTSGQPFVLDPHSNGLHQYRTVSLMYVFSADGEKEESLGLPGRVYQQKVPEWTPDVQYYSTKEYPRRDHAQHYNVRGTLALPVFEPSMQSCVGVLELIMTSQKINYAPEVDKICRALEAVNLKSSEILGHQYTQICNEGRQNALAEILEILTVVCETHNLPLAQTWVPCRHRSVLAHGGGLKKSCSSFDGSCMGKVCMSTTDIAFYIIDAHLWGFREACVEHHLQQGQGVAGRAFSSHSMSFCRNITRFCKIDYPLVHYALMFGLTSSFSICLRSSHTGDDDYVLEFFLPPRITDFNEQKALLGSILTIMKQHFQSLKIASGVELEQNALVETIEATIEGVHLRFESIPVRQDASPNVREELAQDPSLQKIMMGCNDGGSIGDQIPSLETKNTNKPSERKRGKTEKSISLEVLQRYFAGSLKDAAKSLGVCPTTMKRICRQHGISRWPSRKINKVNRSLSKLKRVIESVQGAEGAFTLNPLSTSPLPFPEHSTPNKFSQQASPTEPQIRENELDASKVLETTRIARAQCLEKMVNDKSGSIREVGKETKGPRAKSCSSADSTNPTSHGSCHGSPPIESSPVKDIFITSNNDQCVGLRSPEATMQPPNNTLSYPTTCAMPDMVATELQEPFGGMLVEDAGSSKDLRNLCPSVAEAIVEDMAPEPCRTNPPFSGLAPKQCMDPLKETVTPFASRKEMKTVTIKATYREDIIRFRVSLNCGIVELKEEVAKRLKLEVGTFDIKYLDDDHEWVLIACDADLQECIDVSRSSASNIIRVLVHEITSHLGSSCESSGE

SEQ ID NO: 397 - protein, 840 aa, Arachis ipaensis
MPPLEILDRYCVIKERMTQALRYFKELTEQNVLAQVWAPVRNGNRFVLTTSGQPFVLDPHSNGLHQYRTVSLMYVFSADGEKEESLGLPGRVYQQKVPEWTPDVQYYSTKEYPRRDHAQHYNVRGTLALPVFEPSMQSCVGVLELIMTSQKINYAPEVDKICRALEAVNLKSSEILGHQYTQICNEGRQNALAEILEILTVVCETHNLPLAQTWVPCRHRSVLAHGGGLKKSCSSFDGSCMGKVCMSTTDIAFYIIDAHLWGFREACVEHHLQQGQGVAGRAFSSHSMSFCRNITRFCKIDYPLVHYALMFGLTSSFSICLRSSHTGDDDYVLEFFLPPRITDFNEQKALLGSILTIMKQHFQSLKIASGVELEQNALVETIEATIEGVHLRFESIPVRQDASPNVREELAQDPSLQKIMMGCNDGGSIGDQIPSLETKNTNKPSERKRGKTEKSISLEVLQRYFAGSLKDAAKSLGVCPTTMKRICRQHGISRWPSRKINKVNRSLSKLKRVIESVQGAEGAFTLNPLSTSPLPFPEHSTPNKFSQQASPTEPQIRENELDASKVLETTRIARAQCLEKMVNDKSGSIREVGKETKGPRAKSCSSADSTNPTSHGSCHGSPPIESSPVKDIFITSNNDQCVGLRSPEATMQPPNNTLSYPTTCAMPDMVATELQEPFGGMLVEDAGSSKDLRNLCPSVAEAIVEDMAPEPCRTNPPFSGLAPKQCMDPLKETVTPFASRKEMKTVTIKATYREDIIRFRVSLNCGIVELKEEVAKRLKLEVGTFDIKYLDDDHEWVLIACDADLQECIDVSRSSASNIIRVLVHEITSHLGSSCESSGE

SEQ ID NO: 398 - protein, 909 aa, Cajanus cajan
MDFDIGLESPWPLDHVSLVSNPMSPFLLSTISEQPFSPVWAFSDVEDDRQIRIAASGNTNTTNENPVENDANKKTVSPLVALPPSENPDGYCLIKERMTQALRHFKELTEQNVLAQVWAPVRNGNRYALTTSGQPFVLDPHSNGLHQYRTVSLMYMFSVDGENDEIQGLPGRVFQHKIPEWTPNVQYYSSKEYQRLNHAQHYNVRGTLALPVFEPAGQSCVAVLELIMTSQKINYAPEVDKICKALEAVNLRSSEILEHPYNQICNEDRQYALAEILEILTVVCETHSLPLAQTWVPCKHRSVLAHGGGVKKSCSSFDGCCMGQVCMSITEVAFYVIDARTWGFHEACVEHHLQQGQGVAGRAFLSHKMCFCGNITQFCKTEYPLVHYAIMFGLTSCFAVCLQSSHTGNDEYVLEFFLPPMITDFNEQKSLLGSILATMKPHFQSFKIAAGVELEENGSVEIVEAINERVHLRFESIPITQSSKSPPRHALPNMGEALPPEPSEQQIMAYCDDINDGGSLGDNAGGHIDQNTLLETKTKKKPSERKRGKAEKSISLDILQHYFTGSLKDAAKSLGVCPTTMKRICRQHGISRWPSRKIKKVNRSLSKLKCVIESVHGAEGAFGLNSLSTSSLPIAAGSFSEPSTSNKQIEMGEQFLGARTQSPEKLINDKVGTIQEIGTKGSNKLRTGSGSSEGSANPTPHGSCQGSPPNEISPTKDIFIAGNNEQCLVLRGSLESTLLSTRTSTPNRPTAYPMPNIVDTTEPQVPFVGQLLEGAGSSKDLRNLCPSADAVLEDQVPEACRMNPQRVKSVTIKATYKEDIIRFKVSLDCGIVELKEEIAKRLKLEVVTFDIKYLDDDHEWVLIACDADLLECMDISSSSGSNIIRLVVHDILSILGSSCESSGDWKGCI

SEQ ID NO: 399 - protein, 802 aa, Cajanus cajan
MSESEEENPDCVPRSKAEEEGGCNMDFDLELESSWPLDHMSFVSNPMSPFLFSNTSDQPYSPLWAFSDGEDERHPRFPASAFSDCHKIFSCDSNSVAEKPVENDDHKKLLPPLVPMPPVDTLDGYCVIKERMTQALRYFKELTELNVLAQVWAPVRNGNRFVLTTSGQPFVLDPHSNGLNQYRTVSLMYMFSVDGENDGSLGLPGRVFQQKLPEWTPNVLYYSSKEYPRRDYAQHYNVRGTLALPVFEPSMQSCLGVLELIMTSPKINYAPEVDKICKALETVNLRSSEILDQPYNITLAMLLNQICNEGRQNALSEILEILTVVCETHNLPLAQTWIPCRHRSVLAQGGGLKKSCSSFDGSCMGKVCMSTTDIAFYIIDAHLWGFRDACVEHHLQQGQGVAGRAFLSHNMCFCSNITQFCKTDYPLVHYALMFGLTSCFAICLRSSHTGNDDYVLEFFLPPRVTDFHEQKTLLGSILASVKQHFQSLKIASGVELEDCSIEIVEATIERVHTRFESIPIAPSIKSPTRHDTSPNMGRNIEHIPSLEAKNIKKPSERKRGKTEKSISLEVLQRYFAGSLKDAAKSLGVCPTTMKRICRQHGISRWPSRKINKVNRSLSKLKRVIESVQGAEGAFGLNSLSPSPLPIAVGSFPEPFPYPMPDFASTELQEPFGGMLIEDAGLDLSPKQSMDTPNKAVTPFAARKEMKTVTIKATYREDIIRFRVPLTCGIVELKEEVAKRLKLEVGTFDIKYLDDDHEWVLIACDADLQECMDVSRSSGSNIIRVLVHDITSNLGSSCESSGE

SEQ ID NO: 400 - protein, 988 aa, Cajanus cajan
MSESKEENHDLPPKSKPLEEHGFAMDFDIGLESPWPLDHVSLVSNPMSPFLLSTISEQPFSPVWAFSDVEDDRQIRIAASGNTNTTNENPVENDANKKTVSPLVALPPSENPDGYCLIKERMTQALRHFKELTEQNVLAQVWAPVRNGNRYALTTSGQPFVLDPHSNGLHQYRTVSLMYMFSVDGENDEIQGLPGRVFQHKIPEWTPNVQYYSSKEYQRLNHAQHYNVRGTLALPVFEPAGQSCVAVLELIMTSQKINYAPEVDKICKALEAVNLRSSEILEHPYNQICNEDRQYALAEILEILTVVCETHSLPLAQTWVPCKHRSVLAHGGGVKKSCSSFDGCCMGQVCMSITEVAFYVIDARTWGFHEACVEHHLQQGQGVAGRAFLSHKMCFCGNITQFCKTEYPLVHYAIMFGLTSCFAVCLQSSHTGNDEYVLEFFLPPMITDFNEQKSLLGSILATMKPHFQSFKIAAGVELEENGSVEIVEAINERVHLRFESIPITQSSKSPPRHALPNMGEALPPEPSEQQIMAYCDDINDGGSLGDNAGGHIDQNTLLETKTKKKPSERKRGKAEKSISLDILQHYFTGSLKDAAKSLGVCPTTMKRICRQHGISRWPSRKIKKVNRSLSKLKCVIESVHGAEGAFGLNSLSTSSLPIAAGSFSEPSTSNKFNCQNSLTIRPSEPKTDENDFDASRASETNRQIEMGEQFLGARTQSPEKLINDKVGTIQEIGTKGSNKLRTGSGSSEGSANPTPHGSCQGSPPNEISPTKDIFIAGNNEQCLVLRGSLESTLLSTRTSTPNRPTAYPMPNIVDTTEPQVPFVGQLLEGAGSSKDLRNLCPSADAVLEDQVPEACRMNPQRSDLAPMQHMNTLYNNVPPFPVRKGVKSVTIKATYKEDIIRFKVSLDCGIVELKEEIAKRLKLEVVTFDIKYLDDDHEWVLIACDADLLECMDISSSSGSNIIRLVVHDILSILGSSCESSGDWKGCI

SEQ ID NO: 401 - protein, 989 aa, Cajanus cajan
MSESEEENPDCVPRSKAEEEGGCNMDFDLELESSWPLDHMSFVSNPMSPFLFSNTSDQPYSPLWAFSDGEDERHPRFPASAFSDCHKIFSCDSNSVAEKPVENDDHKKLLPPLVPMPPVDTLDGYCVIKERMTQALRYFKELTELNVLAQVWAPVRNGNRFVLTTSGQPFVLDPHSNGLNQYRTVSLMYMFSVDGENDGSLGLPGRVFQQKLPEWTPNVLYYSSKEYPRRDYAQHYNVRGTLALPVFEPSMQSCLGVLELIMTSPKINYAPEVDKICKALETVNLRSSEILDQPYNQICNEGRQNALSEILEILTVVCETHNLPLAQTWIPCRHRSVLAQGGGLKKSCSSFDGSCMGKVCMSTTDIAFYIIDAHLWGFRDACVEHHLQQGQGVAGRAFLSHNMCFCSNITQFCKTDYPLVHYALMFGLTSCFAICLRSSHTGNDDYVLEFFLPPRVTDFHEQKTLLGSILASVKQHFQSLKIASGVELEDCSIEIVEATIERVHTRFESIPIAPSIKSPTRHDTSPNMGEEVPQDPSEQQMLMYCNDINDGGSLGDNAGRNIEHIPSLEAKNIKKPSERKRGKTEKSISLEVLQRYFAGSLKDAAKSLGVCPTTMKRICRQHGISRWPSRKINKVNRSLSKLKRVIESVQGAEGAFGLNSLSPSPLPIAVGSFPEPCTPNKFSQPASLTMRPSEPQMKENELNASKAVETTGMEDQFLGGRTQNLAKVINDKGVTTWEVAKEPKRTRTGSGSSEDSTNPTSHGSCHDSPPNESSPVKDIFITSNNDQCAVLRGSPESIMQPTNNTPNQPVPYPMPDFASTELQEPFGGMLIEDAGSSKDLRNLCPLVAEAILEDLVPEACGTINPPGLDLSPKQSMDTPNKAVTPFAARKEMKTVTIKATYREDIIRFRVPLTCGIVELKEEVAKRLKLEVGTFDIKYLDDDHEWVLIACDADLQECMDVSRSSGSNIIRVLVHDITSNLGSSCESSGE

SEQ ID NO: 402 - protein, 945 aa, Cajanus cajan
MSESEEENPDCVPRSKAEEEGGCNMDFDLELESSWPLDHMSFVSNPMSPFLFSNTSDQPYSPLWAFSDGEDERHPRFPASAFSDCHKIFSCDSNSVAEKPVENDDHKKLLPPLVPMPPVDTLDGYCVIKERMTQALRYFKELTELNVLAQVWAPVRNGNRFVLTTSGQPFVLDPHSNGLNQYRTVSLMYMFSVDGENDGSLGLPGRVFQQKLPEWTPNVLYYSSKEYPRRDYAQHYNVRGTLALPVFEPSMQSCLGVLELIMTSPKINYAPEVDKICKALETVNLRSSEILDQPYNQICNEGRQNALSEILEILTVVCETHNLPLAQTWIPCRHRSVLAQGGGLKKSCSSFDGSCMGKVCMSTTDIAFYIIDAHLWGFRDACVEHHLQQGQGVAGRAFLSHNMCFCSNITQFCKTDYPLVHYALMFGLTSCFAICLRSSHTGNDDYVLEFFLPPRVTDFHEQKTLLGSILASVKQHFQSLKIASGVELEDCSIEIVEATIERVHTRFESIPIAPSIKSPTRHDTSPNMGEEVPQDPSEQQMLMYCNDINDGGSLGDNAGRNIEHIPSLEAKNIKKPSERKRGKTEKSISLEVLQRYFAGSLKDAAKSLGVCPTTMKRICRQHGISRWPSRKINKVNRSLSKLKRVIESVQGAEGAFGLNSLSPSPLPIAVGSFPEPCTPNKFSQPASLTMRPSEPQMKENELNASKAVETTGMEDQFLGGRTQNLAKVINDKGVTTWEVAKEPKRTRTGSGSSEDSTNPTSHGSCHDSPPNESSPVKDIFITSNNDQCAVLRGSPESIMQPTNNTPNQPVPYPMPDFASTELQEPFGGMLIEDAGSSKDLRNLCPLVAEAILEDLVPEACGTINPPGLDLSPKQSMDTPNKAVTPFAARKEMKTVTIKATYREDIIRFRVPLTCGIVELKEEVAKRLKLETCRSAWMFQDHQGAT

SEQ ID NO: 403 - protein, 1045 aa, Cannabis sativa
MSESEEEAPPPPPPSTTATIASNTVSFPPKSSKEVLMDFDLDLDNPWPMDQIAFVSNPMSPLLFSSSSADHPFSPLWAFADAENEENNHNNSNNHNSNNNTNNCNSNNNNSSNSNNNSNKFGRHANSTPMADSSRFSCNSNSVAQRPVGNEENRSLPSPFSGLVPVDNPNGYYWIKERMTQALRYLKESTDQHVLAQVWAPVKNGCRYVLSTSGQPFVLDPDSNGLHQYRMVSLMYSFSVDGGETNEVLGLPGRVFRQKLPEWTPNVQYYSITEYPRLDHAQHYNVRGSLALPVFEPSGQSCVGVLELIMTSEKINYAPEVDKVCKALEAVNLRSAEILDHTDTQICNEGRQSALTEILEILTAACETHKLPMAQTWVPCMHRNVLAYGGGLKKNCTSIDGSCMGQVCMSTTEVAFYIVDARMWGFREACLEHHLQKGQGVAGRAFYSRNLCFSSDITQFCKNEYPLVHYARMFELTSCFAVCLQSSHTGNDNYVLEFFLPPNTNPSEQHTILGSLLATMKKHFQSLKVASGIGLEEEGIVEVVRVSANGGLESNLECIRIPQIAESPQGHSALPNGGDMVQRDLMKQPSTVEHDSANGGQDTAHDGGNMNHGSVSDHKETKKSERKRGKTEKSISLEVLQQYFAGSLKDAAKSLGVCPTTMKRICRQHGISRWPSRKINKVNRSLSKLKRVIESVQGAEGAFGLTPIATSPLPVPVTSISRPSTSNGTNQQNSPCHVHYDPPLERKDSPTNSSCRRGQTEIEDQLQGGGILIQKDLVQENGGFYIPENNRGSNHSKSGSGSREVSVGTPTSHGSCQGSPANGNIMLKDPFSYSIQEQCIKVEGSPEPTPQPTNGLIFSVPEALVTAESQEPFGAMLVEDAGSSKDLRNLCHASDAILDESVPEYCWMNPPPLPPRSDFAAPKDTTTTTTDIIITQTQPNVNRVSQEMRSVTIKATYREDIIRFRLSLSCNIVELREEVAKRLKMEVGIFDIKYMDDDQEWVLIACDADLQECMDVCRSSGCNMIRLLIHDIMPNLGSSCESTEE

SEQ ID NO: 404 - protein, 976 aa, Cicer arietinum
MAESEEENQEFLPKTKTSSLEEHGCCAMDFDLDLETSWPLDHMSFVSNPMSPFQFSTISDQPSSPLWAFTDGEDDKHVKLAASALSDCHKIFSSDSNSITEKPVENDENKKHLPPLVPPIENLNGYCAIKEKMTQALRYFKEWTELNVLAQVWAPVRNGNRYMLTTSGQPFVLDDPHSNGLCQYRTVSLMYMFSVDGENDGTLGLPGRVFQQKLPEWSPNVQYYTSKEYPRRYYAQHYNVRGTLALPVFETSLQSCIGVLELIMTSPKINYAPEVEKICKALEAVNLRSSEILDYPYTQICNEGRQNALSEILEILTVVCETHNLPLAQTWVPCRHRSILAHGGGLKKSCSSFDGSCMGQVCMSTTEVALYIIDPHLWGFREACVEHHLQQGQGVAGRAFLSQNMSFCTNITQFCKTDYPLVHYALMFGLTSCFSICLRSSHTGNDYYVLEFFLPPNITEFHEQKTLLGSILAIMKQHFQSLKIAAGVELGEDGSIEIIEAMDESVHIRIESIPIVQSIKSPPRPDASPNMEEDKVPQDPSDIQGENIGGNIDQVSFLGNKNVKKPSERKRGKTEKSISLEVLQRYFAGSLKDAAKSLGVCPTTMKRICRQHGISRWPSRKINKVNRSLSKLKRVIESVQGGEGAFDLNSLNTNQLPIVSSFPEPSTPNTSNQQASLSIRPSEPQIKENGIDASKVSETNIEVVMEDQLLGGRKRSLGKEVIINDKGVPVQKVRARSGSSGDSTNPISHDSCHGSPPIESSTIKEIFIPSNNEQCVALKGSPESRVQPTNGFNSASAYRMPDNVIAELEEPFGGMLIEDAGSSKDLRNLCPSVAEAILEDMAPEPCGTNLPGSSYLAPKQCMDTINTSTTPFAARKEMKTVTIKATYREDIIRFRVTLTCGIVELKEEIAKRLKLEVGTFDVKYLDDDHEWVLIACDADLQECIDVTRSSGGSNIIRVLVHDITSNLGSAYESSGE

SEQ ID NO: 405 - protein, 911 aa, Citrus clementina
MLINTGNPNSETENPKDNDENRRFPSPLSALMPLENPDGYCMIKERITQALRYFKDSTEQHVLAQVWVPVKVGGRYVLTTSGQPFVLDPHSNGLHQYRMVSLMYMFSVDGESDGELGLPGRVFWQKLPEWTPNVQYYSSKEYSRLDHALHHNVRGTMALPVFEPSGQSCVAVIELIMTSQKINYAPEVDKVCKALEAVNLKSSEILDYPSTQICNEGRQNALAEILEILSVVCETHKLPLAQTWVPCRHRSVLAYGGGLKKSCSSIDGSCMGQVCMSTTDVAFYVVDGHMWGFREACVEHHLQKDQGVAGRAFFSLSSCFCKDITQFCKTEYPLVHYARMFGLTSCFAICLRSTYTGDDDYILEFFLPPAITDSYEQQTLLGSILATMKQHFQSLKVASGIDLEDDEGTIEIIEGEATADKKLNLRMESIRIPQSVRSPPQPHALPNGGELGQLDIPEQQLMENFDYMNSRGNAVNVGGNDNPVSLLENKNTRKPSERKRGKTEKSISLEVLQQYFAGSLKDAAKSLGVCPTTMKRICRQHGISRWPSRKINKVNRSLTKLKRVIESVQGTNGTFGLTSLTTSPLPVAVNSISWPSGLNGSNQQNSPNSKPELLGEKILSPIYKTPGSDGHTELEDRLSGGRMSTHEEHIHEQNALSPEIGKGKNSPKTGSGSREESAGSPTSHGSCQGNPANESAPAKDVLVSSIHEPRFKVGGSLELVFQPVGEMNLSAAFSIPDALVTTEPQEPFGGLLVEDAGSSKDLRNLCPAVADAIVDERLPENSCANLPCAELSPKQHLATLSQTMPRVYSRQEMKSVTIKATYREDIIRFRISLSCGILELKEEVAKRLKLELGTFDIKYLDDDQEWVLIACDADLQECLDISRSSGSNMIRLSIHDIMANLGSSCESTGEL

SEQ ID NO: 406 - protein, 943 aa, Citrus clementina
MSPFLISEQPCSPLWAFSDADNDDKLSGHVNYPLFLKCNPNSETENPKDNDENRRFPSPLSALMPLENPDGYCMIKERITQALRYFKDSTEQHVLAQVWVPVKVGGRYVLTTSGQPFVLDPHSNGLHQYRMVSLMYMFSVDGESDGELGLPGRVFWQKLPEWTPNVQYYSSKEYSRLDHALHHNVRGTMALPVFEPSGQSCVAVIELIMTSQKINYAPEVDKVCKALEAVNLKSSEILDYPSTQICNEGRQNALAEILEILSVVCETHKLPLAQTWVPCRHRSVLAYGGGLKKSCSSIDGSCMGQVCMSTTDVAFYVVDGHMWGFREACVEHHLQKDQGVAGRAFFSLSSCFCKDITQFCKTEYPLVHYARMFGLTSCFAICLRSTYTGDDDYILEFFLPPAITDSYEQQTLLGSILATMKQHFQSLKVASGIDLEDDEGTIEIIEGEATADKKLNLRMESIRIPQSVRSPPQPHALPNGGELGQLDIPEQQLMENFDYMNSRGNAVNVGGNDNPVSLLENKNTRKPSERKRGKTEKSISLEVLQQYFAGSLKDAAKSLGVCPTTMKRICRQHGISRWPSRKINKVNRSLTKLKRVIESVQGTNGTFGLTSLTTSPLPVAVNSISWPSGLNGSNQQNSPNSKPELLGEKILSPIYKTPGSDGHTELEDRLSGGRMSTHEEHIHEQNALSPEIGKGKNSPKTGSGSREESAGSPTSHGSCQGNPANESAPAKDVLVSSIHEPRFKVGGSLELVFQPVGEMNLSAAFSIPDALVTTEPQEPFGGLLVEDAGSSKDLRNLCPAVADAIVDERLPENSCANLPCAELSPKQHLATLSQTMPRVYSRQEMKSVTIKATYREDIIRFRISLSCGILELKEEVAKRLKLELGTFDIKYLDDDQEWVLIACDADLQECLDISRSSGSNMIRLSIHDIMANLGSSCESTGEL

SEQ ID NO: 407 - skipped

SEQ ID NO: 408 - protein, 876 aa, Citrus sinensis
NPDGYCMIKERITQALRYFKDSTEQHVLAQVWVPVKVGGRYVLTTSGQPFVLDPHSNGLHQYRMVSLMYMFSVDGESDGELGLPGRVFWQKLPEWTPNVQYYSSKEYSRLDHALHHNVRGTMALPVFEPSGQSCVAVIELIMTSQKINYAPEVDKVCKALEAVNLKSSEILDYPSTQICNEGRQNALAEILEILSVVCETHKLPLAQTWVPCRHRSVLAYGGGLKKSCSSIDGSCMGQVCMSTTDVAFYVVDGHMWGFREACVEHHLQKDQGVAGRAFFSLSSCFCKDITQFCKTEYPLVHYARMFGLTSCFAICLRSTYTGDDDYILEFFLPPAITDSYEQQTLLGSILATMKQHFQSLKVASGIDLEDDEGTIEIIEGEATADKKLNLRMESIRIPQSVRSPPQPHALPNGGELGQLDIPEQQLMENFDYMNSRGNAVNVGGNDNPVSLLENKNTRKLSERKRGKTEKSISLEVLQQYFAGSLKDAAKSLGVCPTTMKRICRQHGISRWPSRKINKVNRSLTKLKRVIESVQGTNGTFGLTSLTTSPLPVAVNSISWPSGLNGSNQQNSPNSKPELLGEKILSPIYKTPGSDGHTELEDRLSGGRMSTHEEHIHEQNALSPEIGKGKNSPKTGSGSREESDGSPTSHGSCQGNPANESAPAKDVLVSSIHEPRFKVGGSLELVFQPVKEMNLSAAFSIPDALVTTEPQEPFGGLLVEDAGSSKDLRNLCPAVADAIVDERLPENSCANLPCAELSPKQHLATLSQTMPRVYSRQEMKSVTIKATYREDIIRFRISLSCGILELKEEVAKRLKLELGTFDIKYLDDDQEWVLIACDADLQECLDISRSSGSNMIRLSIHDIMANLGSSCESTGEL

SEQ ID NO: 409 - protein, 704 aa, Citrus sinensis
MLLNQICNEGRQNALAEILEILSVVCETHKLPLAQTWVPCRHRSVLAYGGGLKKSCSSIDGSCMGQVCMSTTDVAFYVVDGHMWGFREACVEHHLQKDQGVAGRAFFSLSSCFCKDITQFCKTEYPLVHYARMFGLTSCFAICLRSTYTGDDDYILEFFLPPAITDSYEQQTLLGSILATMKQHFQSLKVASGIDLEDDEGTIEIIEGEATADKKLNLRMESIRIPQSVRSPPQPHALPNGGELGQLDIPEQQLMENFDYMNSRGNAVNVGGNDNPVSLLENKNTRKLSERKRGKTEKSISLEVLQQYFAGSLKDAAKSLGVCPTTMKRICRQHGISRWPSRKINKVNRSLTKLKRVIESVQGTNGTFGLTSLTTSPLPVAVNSISWPSGLNGSNQQNSPNSKPELLGEKILSPIYKTPGSDGHTELEDRLSGGRMSTHEEHIHEQNALSPEIGKGKNSPKTGSGSREESDGSPTSHGSCQGNPANESAPAKDVLVSSIHEPRFKVGGSLELVFQPVKEMNLSAAFSIPDALVTTEPQEPFGGLLVEDAGSSKDLRNLCPAVADAIVDERLPENSCANLPCAELSPKQHLATLSQTMPRVYSRQEMKSVTIKATYREDIIRFRISLSCGILELKEEVAKRLKLELGTFDIKYLDDDQEWVLIACDADLQECLDISRSSGSNMIRLSIHDIMANLGSSCESTGEL

SEQ ID NO: 410 - protein, 641 aa, Citrus sinensis
MGQVCMSTTDVAFYVVDGHMWGFREACVEHHLQKDQGVAGRAFFSLSSCFCKDITQFCKTEYPLVHYARMFGLTSCFAICLRSTYTGDDDYILEFFLPPAITDSYEQQTLLGSILATMKQHFQSLKVASGIDLEDDEGTIEIIEGEATADKKLNLRMESIRIPQSVRSPPQPHALPNGGELGQLDIPEQQLMENFDYMNSRGNAVNVGGNDNPVSLLENKNTRKLSERKRGKTEKSISLEVLQQYFAGSLKDAAKSLGVCPTTMKRICRQHGISRWPSRKINKVNRSLTKLKRVIESVQGTNGTFGLTSLTTSPLPVAVNSISWPSGLNGSNQQNSPNSKPELLGEKILSPIYKTPGSDGHTELEDRLSGGRMSTHEEHIHEQNALSPEIGKGKNSPKTGSGSREESDGSPTSHGSCQGNPANESAPAKDVLVSSIHEPRFKVGGSLELVFQPVKEMNLSAAFSIPDALVTTEPQEPFGGLLVEDAGSSKDLRNLCPAVADAIVDERLPENSCANLPCAELSPKQHLATLSQTMPRVYSRQEMKSVTIKATYREDIIRFRISLSCGILELKEEVAKRLKLELGTFDIKYLDDDQEWVLIACDADLQECLDISRSSGSNMIRLSIHDIMANLGSSCESTGEL

SEQ ID NO: 411 - protein, 998 aa, Citrus sinensis
MPEPDKENQTRYMPPAPPRTKEVTFMASSIMDVDVVDLDLDNPWPSDQMGFVSNPMSPFLISEQPCSPLWAFSDADNDDKLSGHVNYPLFLKCNPNSETENPKDNDENRRFPSPLSAVMPLENPDGYCMIKERITQALRYFKDSTEQHVLAQVWVPVKVGGRYVLTTSGQPFVLDPHSNGLHQYRMVSLMYMFSVDGESDGELGLPGRVFWQKLPEWTPNVQYYSSKEYSRLDHALHHNVRGTMALPVFEPSGQSCVAVIELIMTSQKINYAPEVDKVCKALEAVNLKSSEILDYPSTQICNEGRQNALAEILEILSVVCETHKLPLAQTWVPCRHRSVLAYGGGLKKSCSSIDGSCMGQVCMSTTDVAFYVVDGHMWGFREACVEHHLQKGQGVAGRAFFSLSSCFCKDITQFCKTEYPLVHYARMFGLTSCFAICLRSTYTGDDDYILEFFLPPAITDSYEQQTLLGSILATMKQHFQSLKVASGIDLEDDEGTIEIIEGEATADKKLNLRMESIRIPQSVRSPPQPHALPNGGELGQLDIPEQQLMENFDYMNSRGNAVNVGGNDNPVSLLENKNTRKLSERKRGKTEKSISLEVLQQYFAGSLKDAAKSLGVCPTTMKRICRQHGISRWPSRKINKVNRSLTKLKRVIESVQGTNGTFGLTSLTTSPLPVAVNSISWPSGLNGSNQQNSPNSKPELLGEKILSPIYKTPGSDGHTELEDRLSGGRMSTHEEHIHEQNALSPEIGKGKNSPKTGSGSREESDGSPTSHGSCQGNPANESAPAKDVLVSSIHEPRFKVGGSLELVFQPVKEMNLSAAFSIPDALVTTEPQEPFGGLLVEDAGSSKDLRNLCPAVADAIVDERLLENSCANLPCTELSPKQHLATLSQTMPRVYSRQEMKSVTIKATYREDIIRFRISLSCGILELKEEVAKRLKLELGTFDIKYLDDDQEWVLIACDADLQECLDISRSSGSNMIRLSIHDIMANLGSSCESTGEL

SEQ ID NO: 412 - protein, 998 aa, Citrus trifoliata
MPEPDKENQTRYMPPAPPRTKEVTFMASSIMDVDVVDLDLDNPWPSDQMGFVSNPMSPFLISEQPCSPLWAFSDADNDDKLSGHVNYPLFLKCNPNSETENPKDNDENRRFPSPLSALMPLENPDGYCMIKERITQALRHFKDSTEQHVLAQVWVPVKVGGRYVLTTSGQPFVLDPHSNGLHQYRMVSLMYMFSVDGESDGELGLPGRVFWQKLPEWTPNVQYYSSKEYSRLDHALHHNVRGTMALPVFEPSGQSCVAVIELIMTSQKINYAPEVDKVCKALEAVNLKSSEILDYPSTQICNEGRQNALAEILEILSVVCETHKLPLAQTWVPCRHRSVLAYGGGLKKSCSSIDGSCMGQVCMSTTDVAFYVVDGHMWGFREACVEHHLQKGQGVAGRAFFSLSSCFCKDITQFCKTEYPLVHYARMFGLTSCFAICLRSTYTGDDDYILEFFLPPAITDSYEQQTLLGSILATMKQHFQSLKVASGIDLEDDEGTIEIIEGEATADKKLNLRMESIRIPQSVRSPSQPHALPNGGELGQLDIPEQQLMENFDYMNSRGNAVNVGGNDNPVSLLENKNTRKPSERKRGKTEKSISLEVLQQYFAGSLKDAAKSLGVCPTTMKRICRQHGISRWPSRKINKVNRSLTKLKRVIESVQGTNGTFGLTSLTTSPLPVAVNSISWPSGLNGSNQQNSPNSKPELLGEKILSPIYKTPGSDGHTELEDRLSGGRMSTHEEHIHEQNALSPEIGKGKNSPKTGSGSREESAGSPTSHGSCQGNPANESAPAKDVLVSSIHEPRFKVGGSLELVFQPVGEMNLSAAFSIPDALVTTEPQEPFGGLLVEDAGSSKDLRNLCPLVADAIVDERLPENSCANLPCAELSPKQHLATLSQTMPRVYSRQEMKSVTIKATYREDIIRFRISLSCGIHELKEEVAKRLKLELGTFDIKYLDDDQEWVLIACDADLQECLDISRSSGSNMIRLSIHDIMANLGSSCESTGEL

SEQ ID NO: 413 - protein, 1029 aa, Citrus unshiu
PQPKPGIMPEPDEENQTRYMPPAPPRTKEVTFMASSIMDVDVVDLDLDNPWPSDQMGFVSNPMSPFLISEQPCSPLWAFSDADNDDKLSGHVNYPLFLKCNPNSETENPKDNDENRRFPSPLSALMPLENPDGYCMIKERITQALRYFKDSTEQHVLAQVWVPVKVGGRYVLTTSGQPFVLDPHSNGLHQYRMVSLMYMFSVDGESDGELGLPGRVFWQKLPEWTPNVQYYSSKEYSRLDHALHHNVRGTMALPVFEPSGQSCVAVIELIMTSQKINYAPEVDKVCKALEAVNLKSSEILDYPSTQINLLFFFFCLCSHRCIYLAMLLNQICNEGRQNALAEILEILSVVCETHKLPLAQTWVPCRHRSVLAYGGGLKKSCSSIDGSCMGQVCMSTTDVAFYVVDGHMWGFREACVEHHLQKDQGVAGRAFFSLSSCFCKDITQFCKTEYPLVHYARMFGLTSCFAICLRSTYTGDDDYILEFFLPPAITDSYEQQTLLGSILATMKQHFQSLKVASGIDLEDDEGTIEIIEGEATADKKLNLRMESIRIPQSVRSPPQPHALPNGGELGQLDIPEQQLMENFDYMNSRGNAVNVGGNDNPVSLLENKNTRKLSERKRGKTEKSISLEVLQQYFAGSLKDAAKSLGVCPTTMKRICRQHGISRWPSRKINKVNRSLTKLKRVIESVQGTNGTFGLTSLTTSPLPVAVNSISWPSGLNGSNQQNSPNSKPELLGEKILSPIYKTPGSDGHTELEDRLSGGRMSTHEEHIHEQNALSPEIGKGKNSPKTGSGSREESDGSPTSHGSCQGNPANESAPAKDVLVSSIHEPRFKVGGSLELVFQPVGEMNLSAAFSIPDALVTTEPQEPFGGLLVEDAGSSKDLRNLCPAVADAIVDERLPENSCANLPCAELSPKQHLATLSQTMPRVYSRQEMKSVTIKATYREDIIRFRISLSCGILELKEEVAKRLKLELGTFDIKYLDDDQEWVLIACDADLQECLDISRSSGSNMIRLSIHDIMANLGSSCESTGEL

SEQ ID NO: 414 - protein, 1005 aa, Citrus unshiu
PQPKPGIMPEPDEENQTRYMPPAPPRTKEVTFMASSIMDVDVVDLDLDNPWPSDQMGFVSNPMSPFLISEQPCSPLWAFSDADNDDKLSGHVNYPLFLKCNPNSETENPKDNDENRRFPSPLSALMPLENPDGYCMIKERITQALRYFKDSTEQHVLAQVWVPVKVGGRYVLTTSGQPFVLDPHSNGLHQYRMVSLMYMFSVDGESDGELGLPGRVFWQKLPEWTPNVQYYSSKEYSRLDHALHHNVRGTMALPVFEPSGQSCVAVIELIMTSQKINYAPEVDKVCKALEAVNLKSSEILDYPSTQICNEGRQNALAEILEILSVVCETHKLPLAQTWVPCRHRSVLAYGGGLKKSCSSIDGSCMGQVCMSTTDVAFYVVDGHMWGFREACVEHHLQKDQGVAGRAFFSLSSCFCKDITQFCKTEYPLVHYARMFGLTSCFAICLRSTYTGDDDYILEFFLPPAITDSYEQQTLLGSILATMKQHFQSLKVASGIDLEDDEGTIEIIEGEATADKKLNLRMESIRIPQSVRSPPQPHALPNGGELGQLDIPEQQLMENFDYMNSRGNAVNVGGNDNPVSLLENKNTRKLSERKRGKTEKSISLEVLQQYFAGSLKDAAKSLGVCPTTMKRICRQHGISRWPSRKINKVNRSLTKLKRVIESVQGTNGTFGLTSLTTSPLPVAVNSISWPSGLNGSNQQNSPNSKPELLGEKILSPIYKTPGSDGHTELEDRLSGGRMSTHEEHIHEQNALSPEIGKGKNSPKTGSGSREESDGSPTSHGSCQGNPANESAPAKDVLVSSIHEPRFKVGGSLELVFQPVGEMNLSAAFSIPDALVTTEPQEPFGGLLVEDAGSSKDLRNLCPAVADAIVDERLPENSCANLPCAELSPKQHLATLSQTMPRVYSRQEMKSVTIKATYREDIIRFRISLSCGILELKEEVAKRLKLELGTFDIKYLDDDQEWVLIACDADLQECLDISRSSGSNMIRLSIHDIMANLGSSCESTGEL

SEQ ID NO: 415 - protein, 1004 aa, Citrus unshiu
MPEPDEENQTRYMPPAPPRTKEVTFMASSIMDVDVVDLDLDNPWPSDQMGFVSNPMSPFLISEQPCSPLWAFSDADNDDKLSGHVNYPLFLKYIYTCTRNPNSETENPKDNDENRRFPSPLSALMPLENPDGYCMIKERITQALRYFKDSTEQHVLAQVWVPVKVGGRYVLTTSGQPFVLDPHSNGLHQYRMVSLMYMFSVDGESDGELGLPGRVFWQKLPEWTPNVQYYSSKEYSRLDHALHHNVRGTMALPVFEPSGQSCVAVIELIMTSQKINYAPEVDKVCKALEAVNLKSSEILDYPSTQICNEGRQNALAEILEILSVVCETHKLPLAQTWVPCRHRSVLAYGGGLKKSCSSIDGSCMGQVCMSTTDVAFYVVDGHMWGFREACVEHHLQKDQGVAGRAFFSLSSCFCKDITQFCKTEYPLVHYARMFGLTSCFAICLRSTYTGDDDYILEFFLPPAITDSYEQQTLLGSILATMKQHFQSLKVASGIDLEDDEGTIEIIEGEATADKKLNLRMESIRIPQSVRSPPQPHALPNGGELGQLDIPEQQLMENFDYMNSRGNAVNVGGNDNPVSLLENKNTRKLSERKRGKTEKSISLEVLQQYFAGSLKDAAKSLGVCPTTMKRICRQHGISRWPSRKINKVNRSLTKLKRVIESVQGTNGTFGLTSLTTSPLPVAVNSISWPSGLNGSNQQNSPNSKPELLGEKILSPIYKTPGSDGHTELEDRLSGGRMSTHEEHIHEQNALSPEIGKGKNSPKTGSGSREESDGSPTSHGSCQGNPANESAPAKDVLVSSIHEPRFKVGGSLELVFQPVGEMNLSAAFSIPDALVTTEPQEPFGGLLVEDAGSSKDLRNLCPAVADAIVDERLPENSCANLPCAELSPKQHLATLSQTMPRVYSRQEMKSVTIKATYREDIIRFRISLSCGILELKEEVAKRLKLELGTFDIKYLDDDQEWVLIACDADLQECLDISRSSGSNMIRLSIHDIMANLGSSCESTGEL

SEQ ID NO: 416 - skipped

SEQ ID NO: 417 - protein, 1003 aa, Cucumis sativus
MTEPDSDHPSPLFPKSNHRSSSDDRTPLMDFDLDLDIPWPLDQIPSFGSNPMSPFLLSTSDHLASPLWAFSEADDDDDSKFAAYACSVLGTSNSHSVPQKPTENQKFKILPVPSSSWGVLPSENPDGYCLIKEKMAQALRYIKESSDQHVLAQVWAPVKSGGKLVLSTSGQPFFLDSQSNGLHQYRMASLTFSFSLDADQDGYLGLPGRVFQQKLPEWTPNVQYYSSKEYPRLSHALNYNVQGTLALPVFDPSGHSCLGVLELIMTSPKINYAPEVDKVCKALEAVNLKSSEILDHPNNQIQSWQCLSNQICNEGRQNALAEILEVLTVVCETHNLPLAQTWVPCRHRNVLANGGGLKKSCTSFDGSCMGRICMSATEVASYVVDAHMWGFRDACLEHHLQKGQGVSGRAFLSHSSCFCGDVTQFCKTEYPLVHYALMFGLKSCFSICLRSTFTGDDEYILEFFLPPSIVDYQEQKNLLGALMATMKKHFYTLKVASGINLEDKEGLVEIIQASRNGGFDSRFEYIQIPRPVQLPPASDAMPKAVEVAALETLEQQSLMVHDAPKDENNGAWDGESHKSVPCPQNKEVKKTSERKRGKAEKSISLEVLQQYFAGSLKDAAKSLGVCPTTMKRICRQHGISRWPSRKINKVNRSLSKLKRVIESVQGAEGAFGISSLATSPLPVTVSSSSHPLTPEGSNQQNFVASQPSDSQYKETNTPEAQTNDTQARLEDRLHRGVLSPEEPIHEQNGFLPKFGNGLNNFRTGSGSREESAGTPTSHGSCQGSPANDSALANNPISIRQHEQCARRESPEVAFHPIDKLNISAPPCSIPDTLVMVEPEEPFGGMLIEDAGSSKDLKNLCASVADAVLDEQVPEFCWSNHHDIALRQPMDSVCHTVPHISLRQEPRRMTIKATYKEDIIRFRIPLTSGIVELREEVAKRLKLEVGTFDIKYMDDDREWVLIACDADLQECVDISKSSGSNIIRLSVHDLNVNLGSSCESTGGE

SEQ ID NO: 418 - protein, 993 aa, Cucumis sativus
MTEPDSDHPSPLFPKSNHRSSSDDRTPLMDFDLDLDIPWPLDQIPSFGSNPMSPFLLSTSDHLASPLWAFSEADDDDDSKFAAYACSVLGTSNSHSVPQKPTENQKFKILPVPSSSWGVLPSENPDGYCLIKEKMAQALRYIKESSDQHVLAQVWAPVKSGGKLVLSTSGQPFFLDSQSNGLHQYRMASLTFSFSLDADQDGYLGLPGRVFQQKLPEWTPNVQYYSSKEYPRLSHALNYNVQGTLALPVFDPSGHSCLGVLELIMTSPKINYAPEVDKVCKALEAVNLKSSEILDHPNNQICNEGRQNALAEILEVLTVVCETHNLPLAQTWVPCRHRNVLANGGGLKKSCTSFDGSCMGRICMSATEVASYVVDAHMWGFRDACLEHHLQKGQGVSGRAFLSHSSCFCGDVTQFCKTEYPLVHYALMFGLKSCFSICLRSTFTGDDEYILEFFLPPSIVDYQEQKNLLGALMATMKKHFYTLKVASGINLEDKEGLVEIIQASRNGGFDSRFEYIQIPRPVQLPPASDAMPKAVEVAALETLEQQSLMVHDAPKDENNGAWDGESHKSVPCPQNKEVKKTSERKRGKAEKSISLEVLQQYFAGSLKDAAKSLGVCPTTMKRICRQHGISRWPSRKINKVNRSLSKLKRVIESVQGAEGAFGISSLATSPLPVTVSSSSHPLTPEGSNQQNFVASQPSDSQYKETNTPEAQTNDTQARLEDRLHRGVLSPEEPIHEQNGFLPKFGNGLNNFRTGSGSREESAGTPTSHGSCQGSPANDSALANNPISIRQHEQCARRESPEVAFHPIDKLNISAPPCSIPDTLVMVEPEEPFGGMLIEDAGSSKDLKNLCASVADAVLDEQVPEFCWSNHHDIALRQPMDSVCHTVPHISLRQEPRRMTIKATYKEDIIRFRIPLTSGIVELREEVAKRLKLEVGTFDIKYMDDDREWVLIACDADLQECVDISKSSGSNIIRLSVHDLNVNLGSSCESTGGE

SEQ ID NO: 419 - protein, 933 aa, Cucumis sativus
MMMMILSLLPMLALFLLRAGTSNSHSVPQKPTENQKFKILPVPSSSWGVLPSENPDGYCLIKEKMAQALRYIKESSDQHVLAQVWAPVKSGGKLVLSTSGQPFFLDSQSNGLHQYRMASLTFSFSLDADQDGYLGLPGRVFQQKLPEWTPNVQYYSSKEYPRLSHALNYNVQGTLALPVFDPSGHSCLGVLELIMTSPKINYAPEVDKVCKALEAVNLKSSEILDHPNNQIQSWQCLSNQICNEGRQNALAEILEVLTVVCETHNLPLAQTWVPCRHRNVLANGGGLKKSCTSFDGSCMGRICMSATEVASYVVDAHMWGFRDACLEHHLQKGQGVSGRAFLSHSSCFCGDVTQFCKTEYPLVHYALMFGLKSCFSICLRSTFTGDDEYILEFFLPPSIVDYQEQKNLLGALMATMKKHFYTLKVASGINLEDKEGLVEIIQASRNGGFDSRFEYIQIPRPVQLPPASDAMPKAVEVAALETLEQQSLMVHDAPKDENNGAWDGESHKSVPCPQNKEVKKTSERKRGKAEKSISLEVLQQYFAGSLKDAAKSLGVCPTTMKRICRQHGISRWPSRKINKVNRSLSKLKRVIESVQGAEGAFGISSLATSPLPVTVSSSSHPLTPEGSNQQNFVASQPSDSQYKETNTPEAQTNDTQARLEDRLHRGVLSPEEPIHEQNGFLPKFGNGLNNFRTGSGSREESAGTPTSHGSCQGSPANDSALANNPISIRQHEQCARRESPEVAFHPIDKLNISAPPCSIPDTLVMVEPEEPFGGMLIEDAGSSKDLKNLCASVADAVLDEQVPEFCWSNHHDIALRQPMDSVCHTVPHISLRQEPRRMTIKATYKEDIIRFRIPLTSGIVELREEVAKRLKLEVGTFDIKYMDDDREWVLIACDADLQECVDISKSSGSNIIRLSVHDLNVNLGSSCESTGGE

SEQ ID NO: 420 - protein, 964 aa, Cucurbita maxima
MTEPKPDSDHLSPFFPKSHRSGADDRNPLMDFDLDLDIPWPLDQTPLFSTSDHLASPLWAFSEADDGDDSKFAAYACSVLGTSNLNSVPQKPIENHKFKILPVPSENPDGYCLIKEKMAQALRYIKDLSDQQVLAQVWAPVKNGDKVVLSTSGQPFVLDTQSNGLHRYRLVSLTYMFSLDTELDGSLGLPGRVFQQKLPEWTPNVQYYSSKEYSRLRHALDYNVQGTLALPVFDPSGQSCLGVLELIMTSPRINYAPEVDKVCKALQAVNLKSSEILDRPNIQICNEGRQNALAEILAVLTVVCETHNLPLAQTWVPCRHRNVLANGGGLKKSCTSFDGSCMGRICMSATEVASYVVDAHKWGFREACLEHHLQKGQGVSGRAFSSHSSCFCGDITQFCKNEYPLVHYALMFGLKSCFSICLRSKFTGDDEYILEFFLPPSLVDYQEQKTLLGAMMGTMKQHFYTLKVASGINLEEGGIVEVVQASRNGGFESRLECIHIPPESDAMPNAGEVVALETLQQRSLMVHDAPKDENNTVRDRESDNPVPCVQNKEVKKTSKRKRGKAEKSISLDVLQQYFAGSLKDAAKSLGVCPTTMKRICRQHGISRWPSRKINKVNRSLSKLKRVIDSVQGNEGTFGMSSLATSPLPVAVSSSSHPLTPDGSNQNFFFASQPSDPQCKETNTSEAQTNNTQARLKDQLLRGVSNPEELFHEQNGSLMKLGNGFNNFRTGSGSRDESTGTPTSHGSCQGSPANESNPLSIHHHEQCVRRGSPEAAAFHPIDKPNKSTRACPVSDTLLMVEPKEPFGGMLIKDAGSSKDLKNLCASVADAILDDQVPKFCWPRPSDIAMRQPMESVCHTVPHISARQEPSRMTIKATYKDDIIRFQISTCTGIVELREEVAKRLKLDVGTFDIKYMDDDREWVLTACDADLQECVDISKASGSNIIRLLVHDLSVNLGSSCESTR

SEQ ID NO: 421 - protein, 903 aa, Cucurbita maxima
MMATIPNLLPMLALFLLRAGTSNLNSVPQKPIENHKFKILPVPSENPDGYCLIKEKMAQALRYIKDLSDQQVLAQVWAPVKNGDKVVLSTSGQPFVLDTQSNGLHRYRLVSLTYMFSLDTELDGSLGLPGRVFQQKLPEWTPNVQYYSSKEYSRLRHALDYNVQGTLALPVFDPSGQSCLGVLELIMTSPRINYAPEVDKVCKALQAVNLKSSEILDRPNIQICNEGRQNALAEILAVLTVVCETHNLPLAQTWVPCRHRNVLANGGGLKKSCTSFDGSCMGRICMSATEVASYVVDAHKWGFREACLEHHLQKGQGVSGRAFSSHSSCFCGDITQFCKNEYPLVHYALMFGLKSCFSICLRSKFTGDDEYILEFFLPPSLVDYQEQKTLLGAMMGTMKQHFYTLKVASGINLEEGGIVEVVQASRNGGFESRLECIHIPPESDAMPNAGEVVALETLQQRSLMVHDAPKDENNTVRDRESDNPVPCVQNKEVKKTSKRKRGKAEKSISLDVLQQYFAGSLKDAAKSLGVCPTTMKRICRQHGISRWPSRKINKVNRSLSKLKRVIDSVQGNEGTFGMSSLATSPLPVAVSSSSHPLTPDGSNQNFFFASQPSDPQCKETNTSEAQTNNTQARLKDQLLRGVSNPEELFHEQNGSLMKLGNGFNNFRTGSGSRDESTGTPTSHGSCQGSPANESNPLSIHHHEQCVRRGSPEAAAFHPIDKPNKSTRACPVSDTLLMVEPKEPFGGMLIKDAGSSKDLKNLCASVADAILDDQVPKFCWPRPSDIAMRQPMESVCHTVPHISARQEPSRMTIKATYKDDIIRFQISTCTGIVELREEVAKRLKLDVGTFDIKYMDDDREWVLTACDADLQECVDISKASGSNIIRLLVHDLSVNLGSSCESTR

SEQ ID NO: 422 - protein, 1004 aa, Cucurbita maxima
MTEPDSNHPPTLFPKSTHRSAPDDRTQLMDFDLDLDFPWPLDQIPSFASNPMSPFLVSTSDHLGSPLWAFSEPDDDDDSKFPASTCSVLGTSNSNSVPQKPSENHKFKILPVQSSSWGLIPSENPDGYCLIKEKMAQALRYIKESSDQHVLAQVWAPVKSGGKLVLSTSGQPFVLDSQSNGLHQYRMASLTFMFSLEPDQDGYLGLPGRVFQQKLPEWTPNVQYYSSKEYPRLSHALHYNVQGTLALPVFDPSGQSCLGVLELIMTSPKINYAPEVDKVCKALEAVNLKSSEILDHPNNQIHTSQCFSNQICNEGRQNALAEILEVLTVVCETHNLPLAQTWVPCRHRNVLAYGGGLKKSCTSFDGSCMGRICMSATEVASYVVDAHMWGFRDACLEHHLRKGQGVSGRAFLSHSSCFCGDITQFSKTEYPLVHYALMFGLKSCFSICLRSTFTGDDEYILEFFLPPSIVDYQEQKTLLGALMATMKQHFYTLKVASGINLKDEEGLVEIIQVSRNGGFESRIEYIQIPRPMELPPHSDAMPNAGEVVALEKLQQQSLMVHDTPKDENNSARDDENHNPAPCPQSKEVKKTSERKRGKAEKSISLEVLQQYFAGSLKDAAKSLGVCPTTMKRICRQHGISRWPSRKINKVNRSLSKLKRVIESVQGAEGAFGISSLATSPLPVTVSSSSHPLTPEVSNQQNFVASQPSDPQHKETNTSEGQTIDTWARLEDQLHRGVLSPEEPIHEQNGYLPKFGNGLSNYRTGSGSREESVGTPTSHGSCQGSPANDSGVANNPISIPLQQEQCVRRESPEVVFHPIDKLNISAPARPIPDTLVMVEPTEEAFGGMLIADAGSSKDLRNLCASVADAVLDEQVPEFCWSNPPDIALRQPMDSVCHTVPYMSAGQEARRMTIKASYKEDIIRFRIPLSSGIVELREEVAKRLKMEVGTFDIKYMDDDREWVLMACDADLQECVEISKSSGSNIIRLLVHDLSVNLGSSCESTGE

SEQ ID NO: 423 - protein, 994 aa, Cucurbita maxima
MTEPDSNHPPTLFPKSTHRSAPDDRTQLMDFDLDLDFPWPLDQIPSFASNPMSPFLVSTSDHLGSPLWAFSEPDDDDDSKFPASTCSVLGTSNSNSVPQKPSENHKFKILPVQSSSWGLIPSENPDGYCLIKEKMAQALRYIKESSDQHVLAQVWAPVKSGGKLVLSTSGQPFVLDSQSNGLHQYRMASLTFMFSLEPDQDGYLGLPGRVFQQKLPEWTPNVQYYSSKEYPRLSHALHYNVQGTLALPVFDPSGQSCLGVLELIMTSPKINYAPEVDKVCKALEAVNLKSSEILDHPNNQICNEGRQNALAEILEVLTVVCETHNLPLAQTWVPCRHRNVLAYGGGLKKSCTSFDGSCMGRICMSATEVASYVVDAHMWGFRDACLEHHLRKGQGVSGRAFLSHSSCFCGDITQFSKTEYPLVHYALMFGLKSCFSICLRSTFTGDDEYILEFFLPPSIVDYQEQKTLLGALMATMKQHFYTLKVASGINLKDEEGLVEIIQVSRNGGFESRIEYIQIPRPMELPPHSDAMPNAGEVVALEKLQQQSLMVHDTPKDENNSARDDENHNPAPCPQSKEVKKTSERKRGKAEKSISLEVLQQYFAGSLKDAAKSLGVCPTTMKRICRQHGISRWPSRKINKVNRSLSKLKRVIESVQGAEGAFGISSLATSPLPVTVSSSSHPLTPEVSNQQNFVASQPSDPQHKETNTSEGQTIDTWARLEDQLHRGVLSPEEPIHEQNGYLPKFGNGLSNYRTGSGSREESVGTPTSHGSCQGSPANDSGVANNPISIPLQQEQCVRRESPEVVFHPIDKLNISAPARPIPDTLVMVEPTEEAFGGMLIADAGSSKDLRNLCASVADAVLDEQVPEFCWSNPPDIALRQPMDSVCHTVPYMSAGQEARRMTIKASYKEDIIRFRIPLSSGIVELREEVAKRLKMEVGTFDIKYMDDDREWVLMACDADLQECVEISKSSGSNIIRLLVHDLSVNLGSSCESTGE

SEQ ID NO: 424 - protein, 870 aa, Cucurbita maxima
MAQALRYIKESSDQHVLAQVWAPVKSGGKLVLSTSGQPFVLDSQSNGLHQYRMASLTFMFSLEPDQDGYLGLPGRVFQQKLPEWTPNVQYYSSKEYPRLSHALHYNVQGTLALPVFDPSGQSCLGVLELIMTSPKINYAPEVDKVCKALEAVNLKSSEILDHPNNQIHTSQCFSNQICNEGRQNALAEILEVLTVVCETHNLPLAQTWVPCRHRNVLAYGGGLKKSCTSFDGSCMGRICMSATEVASYVVDAHMWGFRDACLEHHLRKGQGVSGRAFLSHSSCFCGDITQFSKTEYPLVHYALMFGLKSCFSICLRSTFTGDDEYILEFFLPPSIVDYQEQKTLLGALMATMKQHFYTLKVASGINLKDEEGLVEIIQVSRNGGFESRIEYIQIPRPMELPPHSDAMPNAGEVVALEKLQQQSLMVHDTPKDENNSARDDENHNPAPCPQSKEVKKTSERKRGKAEKSISLEVLQQYFAGSLKDAAKSLGVCPTTMKRICRQHGISRWPSRKINKVNRSLSKLKRVIESVQGAEGAFGISSLATSPLPVTVSSSSHPLTPEVSNQQNFVASQPSDPQHKETNTSEGQTIDTWARLEDQLHRGVLSPEEPIHEQNGYLPKFGNGLSNYRTGSGSREESVGTPTSHGSCQGSPANDSGVANNPISIPLQQEQCVRRESPEVVFHPIDKLNISAPARPIPDTLVMVEPTEEAFGGMLIADAGSSKDLRNLCASVADAVLDEQVPEFCWSNPPDIALRQPMDSVCHTVPYMSAGQEARRMTIKASYKEDIIRFRIPLSSGIVELREEVAKRLKMEVGTFDIKYMDDDREWVLMACDADLQECVEISKSSGSNIIRLLVHDLSVNLGSSCESTGE

SEQ ID NO: 425 - protein, 1004 aa, Cucurbita moschata
MTEPDSNHPSTLFPKSTHRSAPDDRTQLMDFDLDLDFPWSLDQIPSFASNPMSPFLVSTSDHLGSPLWAFSEPDDDDDSKFPASTCSVLGTSNSNSVPQKPSENHKFKILPVQSSSWGLIPSENPDGYCLIKEKMAQALRYIKESSDQHVLAQVWAPVKSGGKLVLSTSGQPFVLDSQSNGLHQYRMASLTFMFSLEPDQDGYLGLPGRVFQQKLPEWTPNVQYYSSKEYPRLSHALHYNVQGTLALPVFDPSGQSCLGVLELIMTSPKINYAPEVDKVCKALEAVNLKSSEILDHPNNQIHTSQCFSNQICNEGRQNALAEILEVLTVVCETHNLPLAQTWVPCRHRNVLAYGGGLKKSCTSFDGSCMGRICMSATEVASYVVDAHMWGFRDACLEHHLRKGQGVSGRAFLSHSSCFCGDITQFSKTEYPLVHYALMFGLKSCFSICLRSTFTGDDEYILEFFLPPSIVDYQEQKTLLGALMATMKQHFYTLKVASGINLKDEEGLVEIIQVSRNGGFESRIEYIQIPRPMELPPHSDAMPNAGEVVALEKLQQQSLMVHDTPKDENNSARDDESHNPAPCPQSKEVKKTSERKRGKAEKSISLEVLQQYFAGSLKDAAKSLGVCPTTMKRICRQHGISRWPSRKINKVNRSLSKLKRVIESVQGAEGAFGISSLATSPLPVTVSSSSHPLTPEGSNQQNFVASQPSDPQHKETNTSEGQTIDTWARLEDQLHRGVLSPEEPIHEQNGYLPRFGNGLSNYRTGSGSREESVGTPTSHGSCQGSPANDSGVANNPISIPQQQEQCVRRESPEVAFHPIDKLNISAPARPIPDTLVMVEPTEEAFGGMLIADAGSSKDLRNLCASVADAVLDEQVPEFCWSNPPDIALRQPMDSVCHTVPYMSAGQEARRMTIKASYKEDIIRFRIPLSSGIVELREEVAKRLKMEVGTFDIKYMDDDREWVLMACDADLQECVEISKSSGSNIIRLLVHDISVNLGSSCESTGE

SEQ ID NO: 426 - protein, 994 aa, Cucurbita moschata
MTEPDSNHPSTLFPKSTHRSAPDDRTQLMDFDLDLDFPWSLDQIPSFASNPMSPFLVSTSDHLGSPLWAFSEPDDDDDSKFPASTCSVLGTSNSNSVPQKPSENHKFKILPVQSSSWGLIPSENPDGYCLIKEKMAQALRYIKESSDQHVLAQVWAPVKSGGKLVLSTSGQPFVLDSQSNGLHQYRMASLTFMFSLEPDQDGYLGLPGRVFQQKLPEWTPNVQYYSSKEYPRLSHALHYNVQGTLALPVFDPSGQSCLGVLELIMTSPKINYAPEVDKVCKALEAVNLKSSEILDHPNNQICNEGRQNALAEILEVLTVVCETHNLPLAQTWVPCRHRNVLAYGGGLKKSCTSFDGSCMGRICMSATEVASYVVDAHMWGFRDACLEHHLRKGQGVSGRAFLSHSSCFCGDITQFSKTEYPLVHYALMFGLKSCFSICLRSTFTGDDEYILEFFLPPSIVDYQEQKTLLGALMATMKQHFYTLKVASGINLKDEEGLVEIIQVSRNGGFESRIEYIQIPRPMELPPHSDAMPNAGEVVALEKLQQQSLMVHDTPKDENNSARDDESHNPAPCPQSKEVKKTSERKRGKAEKSISLEVLQQYFAGSLKDAAKSLGVCPTTMKRICRQHGISRWPSRKINKVNRSLSKLKRVIESVQGAEGAFGISSLATSPLPVTVSSSSHPLTPEGSNQQNFVASQPSDPQHKETNTSEGQTIDTWARLEDQLHRGVLSPEEPIHEQNGYLPRFGNGLSNYRTGSGSREESVGTPTSHGSCQGSPANDSGVANNPISIPQQQEQCVRRESPEVAFHPIDKLNISAPARPIPDTLVMVEPTEEAFGGMLIADAGSSKDLRNLCASVADAVLDEQVPEFCWSNPPDIALRQPMDSVCHTVPYMSAGQEARRMTIKASYKEDIIRFRIPLSSGIVELREEVAKRLKMEVGTFDIKYMDDDREWVLMACDADLQECVEISKSSGSNIIRLLVHDISVNLGSSCESTGE

SEQ ID NO: 427 - protein, 870 aa, Cucurbita moschata
MAQALRYIKESSDQHVLAQVWAPVKSGGKLVLSTSGQPFVLDSQSNGLHQYRMASLTFMFSLEPDQDGYLGLPGRVFQQKLPEWTPNVQYYSSKEYPRLSHALHYNVQGTLALPVFDPSGQSCLGVLELIMTSPKINYAPEVDKVCKALEAVNLKSSEILDHPNNQIHTSQCFSNQICNEGRQNALAEILEVLTVVCETHNLPLAQTWVPCRHRNVLAYGGGLKKSCTSFDGSCMGRICMSATEVASYVVDAHMWGFRDACLEHHLRKGQGVSGRAFLSHSSCFCGDITQFSKTEYPLVHYALMFGLKSCFSICLRSTFTGDDEYILEFFLPPSIVDYQEQKTLLGALMATMKQHFYTLKVASGINLKDEEGLVEIIQVSRNGGFESRIEYIQIPRPMELPPHSDAMPNAGEVVALEKLQQQSLMVHDTPKDENNSARDDESHNPAPCPQSKEVKKTSERKRGKAEKSISLEVLQQYFAGSLKDAAKSLGVCPTTMKRICRQHGISRWPSRKINKVNRSLSKLKRVIESVQGAEGAFGISSLATSPLPVTVSSSSHPLTPEGSNQQNFVASQPSDPQHKETNTSEGQTIDTWARLEDQLHRGVLSPEEPIHEQNGYLPRFGNGLSNYRTGSGSREESVGTPTSHGSCQGSPANDSGVANNPISIPQQQEQCVRRESPEVAFHPIDKLNISAPARPIPDTLVMVEPTEEAFGGMLIADAGSSKDLRNLCASVADAVLDEQVPEFCWSNPPDIALRQPMDSVCHTVPYMSAGQEARRMTIKASYKEDIIRFRIPLSSGIVELREEVAKRLKMEVGTFDIKYMDDDREWVLMACDADLQECVEISKSSGSNIIRLLVHDISVNLGSSCESTGE

SEQ ID NO: 428 - protein, 965 aa, Cucurbita moschata
MTEPKPDSDHLSPFFPKSHRSGADDRNPIMDFDLDLDIPWPLDQTPLFSTSDHLASPLWAFSEADDGEDSKFAAYACSVLGTSNLNSVPQKPIENHKFKILPVPSENPDGYCLIKEKMAQALRYIKDLSDQQVLAQVWAPVKNGDKVVLSTSGQPFVLDTQSNGLHRYRLVSLTYMFSLDTELDGSLGLPGRVFQQKLPEWTPNVQYYSSKEYSRLRHALDYNVQGTLALPVFDPSGQSCLGVLELIMTSPRINYAPEVDKVCKALQAVNLKSSEILDRPNIQICNEGRQNALAEILAVLTVVCETHNLPLAQTWVPCRHRNVLANGGGLKKSCTSFDGSCMGRICMSATEVASYVVDAHKWGFREACLEHHLQKGQGVSGRAFSSHSSCFCGDITQFCKNEYPLVHYALMFGLKSCFSICLRSKFTGDDEYILEFFLPPSLVDYQEQKTLLGAMMATMKQHFYTLKVASGIKLEEGGIVEVVQASRNGGFESRLECIHIPPESDAMPNTGEVAALETLQQRSLMVHDAPKDENNTVRDRESDNPVPCVQNKEVKKTSKRKRGKAEKSISLDVLQQYFAGSLKDAAKSLGVCPTTMKRICRQHGISRWPSRKINKVNRSLSKLKRVIDSVQGNEGTFGMSSLATSPLPVAVSSSSHPLTPDGSNQNFFFASQPSDPQRKETNTSEAQTNNTQARLKDQLLRGVSNPEELFHEQNGSLMKLGNGFNNFRTGSGSRDESTGTPTSHGSCQGSPANESNPLSIHHQEQCVRRGSPEAAAFHPIDKPNTSTRACPVPDTLLMVEPKEPFGGMLIKDAGSSKDLKNLCASVADAVLDDQVPKFCWPRPSDIAMRQPMESVCHTVPHISARQEPSRMTIKATYKDDIIRFQISTCTGIVELQEEVAKRLKLDIGTFDIKYMDDDREWVLTACDADLQECVDISKASGSNIIRLLVHDLSVNLGSSCESTRE

SEQ ID NO: 429 - protein, 904 aa, Cucurbita moschata
MMARIPNLLPMLALFLLRAGTSNLNSVPQKPIENHKFKILPVPSENPDGYCLIKEKMAQALRYIKDLSDQQVLAQVWAPVKNGDKVVLSTSGQPFVLDTQSNGLHRYRLVSLTYMFSLDTELDGSLGLPGRVFQQKLPEWTPNVQYYSSKEYSRLRHALDYNVQGTLALPVFDPSGQSCLGVLELIMTSPRINYAPEVDKVCKALQAVNLKSSEILDRPNIQICNEGRQNALAEILAVLTVVCETHNLPLAQTWVPCRHRNVLANGGGLKKSCTSFDGSCMGRICMSATEVASYVVDAHKWGFREACLEHHLQKGQGVSGRAFSSHSSCFCGDITQFCKNEYPLVHYALMFGLKSCFSICLRSKFTGDDEYILEFFLPPSLVDYQEQKTLLGAMMATMKQHFYTLKVASGIKLEEGGIVEVVQASRNGGFESRLECIHIPPESDAMPNTGEVAALETLQQRSLMVHDAPKDENNTVRDRESDNPVPCVQNKEVKKTSKRKRGKAEKSISLDVLQQYFAGSLKDAAKSLGVCPTTMKRICRQHGISRWPSRKINKVNRSLSKLKRVIDSVQGNEGTFGMSSLATSPLPVAVSSSSHPLTPDGSNQNFFFASQPSDPQRKETNTSEAQTNNTQARLKDQLLRGVSNPEELFHEQNGSLMKLGNGFNNFRTGSGSRDESTGTPTSHGSCQGSPANESNPLSIHHQEQCVRRGSPEAAAFHPIDKPNTSTRACPVPDTLLMVEPKEPFGGMLIKDAGSSKDLKNLCASVADAVLDDQVPKFCWPRPSDIAMRQPMESVCHTVPHISARQEPSRMTIKATYKDDIIRFQISTCTGIVELQEEVAKRLKLDIGTFDIKYMDDDREWVLTACDADLQECVDISKASGSNIIRLLVHDLSVNLGSSCESTRE

SEQ ID NO: 430 - protein, 964 aa, Cucurbita pepo
  REGION 1..964: note = subsp. pepo
MTEPKPDSDHISSFFPKSHRSGADDRNPLMDFDLDLDIPWPLDQTPLFSTSDHLASPLWAFSEADDGDDSKFAAYACSVLGTSNLNSVPQKPIENHKFKILPVPSENPDGYCLIKEKMAQALRYIKDLSDQQVLAQVWAPVKNGDKVVLSTSGQPFVLDTQSNGLHRYRLVSLTYMFSLDTELDGSLGLPGRVFQQKLPEWTPNVQYYSSKEYSRLRHALDYNVQGTLALPVFDPSGQSCLGVLELIMTSPRINYAPEVDKVCKALQAVNLKSSEILDRPNIQICNEGRQNALAEILAVLTVVCETHNLPLAQTWVPCRHRNVLANGGGLKKSCTSFDGSCMGRICMSATEVASYVVDAHKWGFREACLEHHLQKGQGVSGRAFSSHSSCFCGDITQFCKNEYPLVHYALMFGLKSCFSICLRSKFTGDDEYILEFFLPPSLVDYQEQKTLLGAMMATMKQHFYTLKVASGIKLEEGGIVEVVQASRNGGFESRLECIHIPPESDAMPNTGEVVALETLQQRSLMVHDAPKDENNTVRDRESDNPVPCVQKEVKKTSKRKRGKAEKSISLDVLQQYFAGSLKDAAKSLGVCPTTMKRICRQHGISRWPSRKINKVNRSLSKLKRVIDSVQGNEGTFGMSSLATSPLPVAVSSSSHPLTPDGSNQNFFFASQPSDPQRKETNTSEAQTNNTQARLKDQLHRGVSNPEELFHEQNGSLMKLGNGFNNFRTGSGSRDESTGTPTSHGSCQGSPANESNPLSIHHQEQCVRRGSPEAAAFHPIDKPNTSTRACPVPDTLLTVEPKEPFGGMLIKDAGSSKDLKNLCTSVADAVLDDQVPKFCWPRPSDIAMRQPMESVCHTVPHISARQEPSRMTIKATYKDDIIRFQISTCTGIVELREEVAKRLKLDVGTFDIKYMDDDREWVLTACDADLQECVDISKASGSNIIRLLVHDLSVNLGSSCESTRE

SEQ ID NO: 431 - protein, 903 aa, Cucurbita pepo
  REGION 1..903: note = subsp. pepo
MMATIPNLLPMLALFLLRAGTSNLNSVPQKPIENHKFKILPVPSENPDGYCLIKEKMAQALRYIKDLSDQQVLAQVWAPVKNGDKVVLSTSGQPFVLDTQSNGLHRYRLVSLTYMFSLDTELDGSLGLPGRVFQQKLPEWTPNVQYYSSKEYSRLRHALDYNVQGTLALPVFDPSGQSCLGVLELIMTSPRINYAPEVDKVCKALQAVNLKSSEILDRPNIQICNEGRQNALAEILAVLTVVCETHNLPLAQTWVPCRHRNVLANGGGLKKSCTSFDGSCMGRICMSATEVASYVVDAHKWGFREACLEHHLQKGQGVSGRAFSSHSSCFCGDITQFCKNEYPLVHYALMFGLKSCFSICLRSKFTGDDEYILEFFLPPSLVDYQEQKTLLGAMMATMKQHFYTLKVASGIKLEEGGIVEVVQASRNGGFESRLECIHIPPESDAMPNTGEVVALETLQQRSLMVHDAPKDENNTVRDRESDNPVPCVQKEVKKTSKRKRGKAEKSISLDVLQQYFAGSLKDAAKSLGVCPTTMKRICRQHGISRWPSRKINKVNRSLSKLKRVIDSVQGNEGTFGMSSLATSPLPVAVSSSSHPLTPDGSNQNFFFASQPSDPQRKETNTSEAQTNNTQARLKDQLHRGVSNPEELFHEQNGSLMKLGNGFNNFRTGSGSRDESTGTPTSHGSCQGSPANESNPLSIHHQEQCVRRGSPEAAAFHPIDKPNTSTRACPVPDTLLTVEPKEPFGGMLIKDAGSSKDLKNLCTSVADAVLDDQVPKFCWPRPSDIAMRQPMESVCHTVPHISARQEPSRMTIKATYKDDIIRFQISTCTGIVELREEVAKRLKLDVGTFDIKYMDDDREWVLTACDADLQECVDISKASGSNIIRLLVHDLSVNLGSSCESTRE

SEQ ID NO: 432 - protein, 1004 aa, Cucurbita pepo
  REGION 1..1004: note = subsp. pepo
MTEPDSNHPSTLFPKSTHRSVPDDRTQLMDFDLDLDFPWPLDQIPSFASNPMSPFLVSTSDHLGSPLWAFSEPDDDDDSKFPASTCSVLGTSNSNSVPQKPSENHKFKILPVQSSSWGLIPSENPDGYCLIKEKMAQALRYIKESSDQHVLAQVWAPVKSGGKLVLSTSGQPFVLDSQSNGLHQYRMASLTFMFSLEPDQDGYLGLPGRVFQQKLPEWTPNVQYYSSKEYPRLSHALHYNVQGTLALPVFDPSGHSCLGVLELIMTSPKINYAPEVDKVCKALEAVNLKSSEILDHPNNQIHTSQCFSNQICNEGRQNALAEILEVLTVVCETHNLPLAQTWVPCRHRNVLAYGGGLKKSCTSFDGSCMGRICMSATEVASYVVDAHMWGFRDACLEHHLRKGQGVSGRAFLSHSSCFCGDITQFSKTEYPLVHYALMFGLKSCFSICLRSTFTGDDEYILEFFLPPSIVDYQEQKTLLGALMATMKQHFYTLKVASGINLEDEEGLVEIIQVSRNGGFESRIEYIQIPRPMELPPHSDAMPNAGEVVALEKLQQQSLMVHDTPKDENNSARDDESHNPAPCPQSKEVKKTSERKRGKAEKSISLEVLQQYFAGSLKDAAKSLGVCPTTMKRICRQHGISRWPSRKINKVNRSLSKLKRVIESVQGAEGAFGISSLATSPLPVTVSSSSHPLTPEGSNQQNFVASQPSDPQYKETNTSEGQTIDTWARLEDQLHRGVLSPEEPIHEQNGYLPRFGNGLSNYRTGSGSREESVGTPTSHGSCQGSPANDSGVANNPISIPQQQEQCVRRESPEVAFHPIDKLNISAPARPIPDTLVMVEPTEEAFGGMLIADAGSSKDLRNLCASVADAVLDEQVPEFCWSNPPDIALRQPMESVCHTVPYMSAGQDARRMTIKASYKEDIIRFRIPLSSGIVELREEVAKRLKMEVGTFDIKYMDDDREWVLMACDADLQECVEISKSSGSNIIRLLVHDISVNLGSSCESTGE

SEQ ID NO: 433 - protein, 994 aa, Cucurbita pepo
  REGION 1..994: note = subsp. pepo
MTEPDSNHPSTLFPKSTHRSVPDDRTQLMDFDLDLDFPWPLDQIPSFASNPMSPFLVSTSDHLGSPLWAFSEPDDDDDSKFPASTCSVLGTSNSNSVPQKPSENHKFKILPVQSSSWGLIPSENPDGYCLIKEKMAQALRYIKESSDQHVLAQVWAPVKSGGKLVLSTSGQPFVLDSQSNGLHQYRMASLTFMFSLEPDQDGYLGLPGRVFQQKLPEWTPNVQYYSSKEYPRLSHALHYNVQGTLALPVFDPSGHSCLGVLELIMTSPKINYAPEVDKVCKALEAVNLKSSEILDHPNNQICNEGRQNALAEILEVLTVVCETHNLPLAQTWVPCRHRNVLAYGGGLKKSCTSFDGSCMGRICMSATEVASYVVDAHMWGFRDACLEHHLRKGQGVSGRAFLSHSSCFCGDITQFSKTEYPLVHYALMFGLKSCFSICLRSTFTGDDEYILEFFLPPSIVDYQEQKTLLGALMATMKQHFYTLKVASGINLEDEEGLVEIIQVSRNGGFESRIEYIQIPRPMELPPHSDAMPNAGEVVALEKLQQQSLMVHDTPKDENNSARDDESHNPAPCPQSKEVKKTSERKRGKAEKSISLEVLQQYFAGSLKDAAKSLGVCPTTMKRICRQHGISRWPSRKINKVNRSLSKLKRVIESVQGAEGAFGISSLATSPLPVTVSSSSHPLTPEGSNQQNFVASQPSDPQYKETNTSEGQTIDTWARLEDQLHRGVLSPEEPIHEQNGYLPRFGNGLSNYRTGSGSREESVGTPTSHGSCQGSPANDSGVANNPISIPQQQEQCVRRESPEVAFHPIDKLNISAPARPIPDTLVMVEPTEEAFGGMLIADAGSSKDLRNLCASVADAVLDEQVPEFCWSNPPDIALRQPMESVCHTVPYMSAGQDARRMTIKASYKEDIIRFRIPLSSGIVELREEVAKRLKMEVGTFDIKYMDDDREWVLMACDADLQECVEISKSSGSNIIRLLVHDISVNLGSSCESTGE

SEQ ID NO: 434 - protein, 951 aa, Fragaria vesca
MSDPEDDRAPSIFPKSKSLDASSLMDFDIDVPWPLDQIHFLSNPTSPLFFSPADDPCSPLWAFSDVNNNDKLARALPDPAQSVSDTNPVAQKRKENEDNRIVPSPFSGLEPNADGYFLIKERITRALRYLKESSDQHVLAQVWAPVWDGNRYVLTTSGQPFVLDPHDGLHQYRMVSLMYMFSVDGENDGVLGLPGRVFQQKLPEWTPNVQYYSIKEYPRLDHAQHYNVQGTLALPVFEPSGRSCIGVIELIMTSQKINYAPEVDKICKALEAVSLKSSEMLDHTSTQIQIRNEGRQTALTEILEILTMVCETHKLPLAQTWVPCMHRNVLAYGGGMKKSCTSFDGSCMEQVCMSTTDVAVYIVDAHMWGFREACVEHHLQKGQGVAGRAFLSRNACFCRDISQFRKTEYPLVHYARMFRLTSSFAICLQSTHTGNDDYILEFFLPPSITDSSEQQTLLGSILAIVKGHCQNLKVASGIGLAEEGIVEIVQASINEGLDSRFECIQIPRSVEPLPGSSLPNREEIVHLDPAKPQLMVDINAINDERNAVHKGGQNNISVPENKDMKKTSERKRGKTEKSISLEVLQQYFAGSLKDAAKSLGVCPTTMKRICRQHGISRWPSRKINKVNRSLSKLKLVIESVQGGEGAFGLSPLTTSPLTGAVGSNSRPFTSSQPYEVQGEKKDSPNSSSPGREGQAGIGDPDIGRGSNSSKTGSGSREASTGTPTSHGSCQGSPANGSAMAKEPFVSTMHEQFAEVDRSPESAFRPPDEVYVPVLCSIPDALLITEPEEPSRGMQLEDAGSSKDLRNLCPLADLTVDEQVPEVFWTDPPYPDSAPKQFIPTLAYTVPHNTSLREMRSVTIKAAYKDDIIRFRISMSSCIVDLREEVAKRLKLEVGTFDMKYMDDDLEWVLIACDADLQECMEICRSSGSNMIRLSVHDILPNLGSSCESTDE

SEQ ID NO: 435 - protein, 720 aa, Glycine max
MQAVKLRSSEILEHQYIQICNEDRQYALAEILEILTVVCETHSLPLAQTWVPCKHRSVLAHGGGHKKSCSSFDGCCMGQVCMSITEVAFYVIDAHTWGFHEACVEHHLQQGQGVAGRAFLSHNMCFCGNIAQFCKTEYPLVHYALMFGLTSCFAVCLQSSHTGNDDYVLEFFLPPGITDFNEQKRLLGSILATMKPHFQSLKIASGIELEENASIEIIEARNERVNLRFESIPITQSSKSPPRHASPNVGEGLPLEPSEQKIMAYFDGINDGGSLGDNAGGHIDQNTSLKIKTKKKPSERKRGKAEKSISLDVLQHYFTGSLKDAAKSLGVCPTTMKRICRQHGISRWPSRKIKKVNRSLSKLKCVIESVHGAERAFGLNSLSTVSLPIAAGSFSEPSTSNKFNRQTSLTIRPSEPKINEKDFDASGASETKRQAAMEDQFLGLEARAQSPEKVINDRGVATQEIGTKGTNKFRTGSGSSESSGNPTPHGSCHGSPPNEISPPKDIFVTGHSEKCLVLRGSLGSTTLHSTSTPNCTTAYPMPHIVETTEPQELFGGQLLERAGSSKDLRNLCPSADAVLEDQVPEAYKMNPQCSDLPQMQHMDNLNNTLTPFAVRKEVKSVTIKATYKEDIIRFKVSMDCGIVELKEEIAKRLKLEAGTFDIKYLDDDHEWVLIACDADLQECMDISRSSGSNVIRLVVHDILPILGSSCESSGDWKGCI

SEQ ID NO: 436 - protein, 990 aa, Glycine max
MSESKDENPDLPPKSKPQEEHGFAMDFDISLESLWPSDHISLVSNPMSPFLFSTISDQPCSPVWAFSDAEDERLIRIAASAGNTNTTTENLVENYDNKKTVPPLVAIPTSENPDAYCLIKERMTQALRHFKELTEQNVLAQVWAPMRNGNRYALTTSGQPFVLDPHSNGLHQYRTVSLMYMFSVDGENDEIMGLPGRVFQQKIPEWTPNVQFYSSKEYQRLNHAQHYNVRGTLALPVFELAGQSCVAVVELIMTSQKINYAPEVDKICKALEAVKLRSSEILEHQYIQICNEDRQYALAEILEILTVVCETHSLPLAQTWVPCKHRSVLAHGGGHKKSCSSFDGCCMGQVCMSITEVAFYVIDAHTWGFHEACVEHHLQQGQGVAGRAFLSHNMCFCGNIAQFCKTEYPLVHYALMFGLTSCFAVCLQSSHTGNDDYVLEFFLPPGITDFNEQKRLLGSILATMKPHFQSLKIASGIELEENASIEIIEARNERVNLRFESIPITQSSKSPPRHASPNVGEGLPLEPSEQKIMAYFDGINDGGSLGDNAGGHIDQNTSLKIKTKKKPSERKRGKAEKSISLDVLQHYFTGSLKDAAKSLGVCPTTMKRICRQHGISRWPSRKIKKVNRSLSKLKCVIESVHGAERAFGLNSLSTVSLPIAAGSFSEPSTSNKFNRQTSLTIRPSEPKINEKDFDASGASETKRQAAMEDQFLGLEARAQSPEKVINDRGVATQEIGTKGTNKFRTGSGSSESSGNPTPHGSCHGSPPNEISPPKDIFVTGHSEKCLVLRGSLGSTTLHSTSTPNCTTAYPMPHIVETTEPQELFGGQLLERAGSSKDLRNLCPSADAVLEDQVPEAYKMNPQCSDLPQMQHMDNLNNTLTPFAVRKEVKSVTIKATYKEDIIRFKVSMDCGIVELKEEIAKRLKLEAGTFDIKYLDDDHEWVLIACDADLQECMDISRSSGSNVIRLVVHDILPILGSSCESSGDWKGCI

SEQ ID NO: 437 - protein, 991 aa, Glycine max
MSEPEEENNQDYVPRSKPAEEGGGGCTTMDFDLDLETSWPLDHMAFGSNPMSPFLFSTSSDQPYSPLWAFSDGEDPKLPASAFSDCHKIFSCDSNSIAEKPVENDDNKKNLPPLVPMPPVENLDGYCVIKERMTQALRYFKELTELNVLAQVWAPVRNGNRYVLTTSGQPFVLDPHSNGLHQYRTVSLMYMFSVDGENDGSLGLPGRVFQQKLPEWTPNVQYYSSKEYPRRDHAQHYNVRGTLALPVFEPSIQSCVGVLELIMTSPKINYAPEVDKICKALETVNLRSSEILDHPYTQICNEGRQNALSEILEILTVVCETLNLPLAQTWIPCKHRSVLAQGGGVKKSCSSFDGSCMGKVCMSTTDIAFYIIDAHLWGFREACVEHHLQQGQGVAGRAFLSHSMCFCSNITQFCKTDYPLVHYALMFGLTSCFTICLRSSHTGNDDYVLEFFLPPRITDFHEQKTLLGSILAIMKQHFQSLKIASGVELEDGSIEIIEATIERVHTRHESIPITPSIKSPPRLDTSPNMGEEVPQDPSEQQILMYCNDMNDGRSLGKNADGIDHMPSIETKNIKKPLERKRGKTEKSISLEVLQRYFAGSLKDAAKSLGVCPTTMKRICRQHGISRWPSRKINKVNRSLSKLKRVIESVQGAEGAFGLNSLSKSPLPIAVGSFPEPSTPNKFSQSASLSIKPSEPQVKENELNASKALEANRQAGMEDQLLGGRTQNLEKVINDKGGYTREVGREPKRTRTRNGSSEDSTNPTSHGSCHDSPPNESSPVKDIFITSNNDQCAGIKRSPESTLQPTINTPSRPTAYPMPDFVAVELQEPFGGMLIEDAGSSKDLRNLCPLVAEVILEDMIPEACGTNLPGPDLSPKLSMGTPNKAVTPFAAMKEMKTVTIKATYREDIIRFRVSLTCGIVELKEEIAKRLKLEVGTFDIKYLDDDHEWVLIACDADLQECMDVSRSSGSNIIRVLVHDITSNLGSSCESSGE

SEQ ID NO: 438 - protein, 987 aa, Glycine max
MSESKEENPDLLLKSKAQEEHGFVMDFGIGLESLWPLDHISLVSNPMPPFLFSTISEQPFSPVWAFSDAEDERQIRIAASGNTNTTTENPIENDDNKKTVPPLVAMTASENPDGYCLIKERMTQALRHFKELTEQNVLAQVWAPVRNGNRYALTTSGQPFVLDPHSNGLHQYRTASLMYMFSVDGENDEILGLPGRVFQHKIPEWTPNVQFYSSKEYQRLNHAQHYNVRGTLALPVFELAGQSCVAVVELIMTSQKINYAPEVDKICKALEAVKLRSSEILEHPYNQICNEYRQYALAEILEILTAVCETHSLPLAQTWVPCKHRSVLAHGGGLKKICSSFNGCCMGQVCMSITEVAFYVIDAHKWGFHEACAEHHLQQGQGVAGRAFLSHNMCFCGNNTQFCKTEYPLVHYALMFHLNSCFAVCLQSSHTGNDDYVLEFFLPPGITDFNEQKRLLGSILATMKPHFQSLKIASGVELEGNASIEIIDARNERVHLRFESIPITQSSKSPPRHTSPNMGEGLPLEPSEPKIMAYFDGINDGGSLGDNAGGHIDQNTSLEIKTKKKPSDRKRGKAEISISLNVLQHYFTGSLKDAAKSLGVCPTTMKRICRQHGISRWPSRKIKKVNHSLSKLKCVIESVHGAEGAFGLNSLSTGSLPIAAGSFSDPFTSNKFHRQTTLTIRPSEPKINENDFDAFGASETKRQVAMEDQFLGLEARTRSPEKVINDKGVSIQEIGTKGTNKFRTGSGSSGSGNPTHASCHGSPPNEISPPKDTFVTGNSEQCLVLRGSLGSTTLHSTSTPNRATAYPMLHIVETTEPQEPFGGQLLEVAGSSKDLRNLCPSADAVLEDQVPEAYKMNPQCSDLPQMQHMDTLNKTMTPFAVRKEVNSVTIKATYKEDIIRFKVSMDCGIVELKEEIAKRLKLEVGTFHNKYLDDDHEWVLIACDADLQECMDISRSSGGNIIRLVVHDILPILGSSCESSRDWKGCI

SEQ ID NO: 439 - protein, 991 aa, Glycine max
MPESEEENQDYVPRSKPSEEAGGGCTMDFDLDLETSWPLDHMAFGSNPMSPFLFSTSSDQPYSPLWAFSDGEDPKLPASAFSDCHKIFSCDSNSIAEKPVENDDNKKLLPPLVPISPVENLDGYCVIKERMTQALRYFKELTELNVLAQVWAPVKNGNRYVLTTSGQPFVLDPHSNGLYQYRTVSLMYMFSVDGENDGSLGLPGRVFQQKLPEWTPNVLYYSSKEYPRRDHAQHYNVRGTLALPVFEPSIQSCVGVLELIMTSQKINYAPEVDKICKALETVNLRSSEILDHPHTQICNEGRQNALSEILEILTVVCETHNLPLAQTWIPCKHRSVLAQGGGVKKSCSSFDGRCMGKVCMSTTDIAFYIIDAHLWGFREACVEHHLQQGQGVAGRAFLSHGMCFCSNITQFYKTDYPLVHYALMFGLTSCFAICLRSSHTGNDDYVLEFFLPPRITHIHEQKTLLGSILAIMKQHFQSLHIASGVEPEDGSIEIIEATIERVHTRLESIPIASSIKSPPRPDTSPNMGEEVPQDPSEQQILMYCNDINNGGSLGENAARNIDHMPSLETKNINKPLERKRGKTEKSISLEVLQRYFAGSLKDAAKSLGVCPTTMKRICRQHGISRWPSRKINKVNRSLSKLKRVIESVQGAEGAFGLNSLSKSPLPIAVGSFPEPSTPNKFSLPASLSINPSEPQIKENELNASKALETNSQAVMEEDRLLGGRTPHLEKVINDKGRHTREVGKEPKRTRTGSGSSEDSTNPTSHGSCHDSPPNESSPVKNIFITSNNDQCAGLKRSPESTLQLTTNTPNRPAAYPMPDFVAAELQEPFGGMLIEDAGSSKDLRNLCPSVAETILEDMVPEACGTNIPGPDLSPKQSMGTPNKAVTPFVAMKEMKTVTIKATYREDIIRFRVSLTCGIVELKEEVAKRLKLEVGTFEIKYLDDDHEWVLIACDADLQECMDVSRSSGSKIIRVLVHDITSNLGSSCESSGE

SEQ ID NO: 440 - protein, 926 aa, Glycine max
MEKTPSFQLLPSLIATRSSLLLFLGDSNSIAEKPVENDDNKKLLPPLVPISPVENLDGYCVIKERMTQALRYFKELTELNVLAQVWAPVKNGNRYVLTTSGQPFVLDPHSNGLYQYRTVSLMYMFSVDGENDGSLGLPGRVFQQKLPEWTPNVLYYSSKEYPRRDHAQHYNVRGTLALPVFEPSIQSCVGVLELIMTSQKINYAPEVDKICKALETVNLRSSEILDHPHTQICNEGRQNALSEILEILTVVCETHNLPLAQTWIPCKHRSVLAQGGGVKKSCSSFDGRCMGKVCMSTTDIAFYIIDAHLWGFREACVEHHLQQGQGVAGRAFLSHGMCFCSNITQFYKTDYPLVHYALMFGLTSCFAICLRSSHTGNDDYVLEFFLPPRITHIHEQKTLLGSILAIMKQHFQSLHIASGVEPEDGSIEIIEATIERVHTRLESIPIASSIKSPPRPDTSPNMGEEVPQDPSEQQILMYCNDINNGGSLGENAARNIDHMPSLETKNINKPLERKRGKTEKSISLEVLQRYFAGSLKDAAKSLGVCPTTMKRICRQHGISRWPSRKINKVNRSLSKLKRVIESVQGAEGAFGLNSLSKSPLPIAVGSFPEPSTPNKFSLPASLSINPSEPQIKENELNASKALETNSQAVMEEDRLLGGRTPHLEKVINDKGRHTREVGKEPKRTRTGSGSSEDSTNPTSHGSCHDSPPNESSPVKNIFITSNNDQCAGLKRSPESTLQLTTNTPNRPAAYPMPDFVAAELQEPFGGMLIEDAGSSKDLRNLCPSVAETILEDMVPEACGTNIPGPDLSPKQSMGTPNKAVTPFVAMKEMKTVTIKATYREDIIRFRVSLTCGIVELKEEVAKRLKLEVGTFEIKYLDDDHEWVLIACDADLQECMDVSRSSGSKIIRVLVHDITSNLGSSCESSGE

SEQ ID NO: 441 - protein, 882 aa, Glycine max
MTASENPDGYCLIKERMTQALRHFKELTEQNVLAQVWAPVRNGNRYALTTSGQPFVLDPHSNGLHQYRTASLMYMFSVDGENDEILGLPGRVFQHKIPEWTPNVQFYSSKEYQRLNHAQHYNVRGTLALPVFELAGQSCVAVVELIMTSQKINYAPEVDKICKALEAVKLRSSEILEHPYNQICNEYRQYALAEILEILTAVCETHSLPLAQTWVPCKHRSVLAHGGGLKKICSSFNGCCMGQVCMSITEVAFYVIDAHKWGFHEACAEHHLQQGQGVAGRAFLSHNMCFCGNNTQFCKTEYPLVHYALMFHLNSCFAVCLQSSHTGNDDYVLEFFLPPGITDFNEQKRLLGSILATMKPHFQSLKIASGVELEGNASIEIIDARNERVHLRFESIPITQSSKSPPRHTSPNMGEGLPLEPSEPKIMAYFDGINDGGSLGDNAGGHIDQNTSLEIKTKKKPSDRKRGKAEISISLNVLQHYFTGSLKDAAKSLGVCPTTMKRICRQHGISRWPSRKIKKVNHSLSKLKCVIESVHGAEGAFGLNSLSTGSLPIAAGSFSDPFTSNKFHRQTTLTIRPSEPKINENDFDAFGASETKRQVAMEDQFLGLEARTRSPEKVINDKGVSIQEIGTKGTNKFRTGSGSSGSGNPTHASCHGSPPNEISPPKDTFVTGNSEQCLVLRGSLGSTTLHSTSTPNRATAYPMLHIVETTEPQEPFGGQLLEVAGSSKDLRNLCPSADAVLEDQVPEAYKMNPQCSDLPQMQHMDTLNKTMTPFAVRKEVNSVTIKATYKEDIIRFKVSMDCGIVELKEEIAKRLKLEVGTFHNKYLDDDHEWVLIACDADLQECMDISRSSGGNIIRLVVHDILPILGSSCESSRDWKGCI

SEQ ID NO: 442 - protein, 985 aa, Glycine max
MPESEEENQDYVPRSKPSEEAGGGCTMDFDLDLETSWPLDHMAFGSNPMSPFLFSTSSDQPYSPLWAFSDGEDPKLPASAFSDCHKIFSSEKPVENDDNKKLLPPLVPISPVENLDGYCVIKERMTQALRYFKELTELNVLAQVWAPVKNGNRYVLTTSGQPFVLDPHSNGLYQYRTVSLMYMFSVDGENDGSLGLPGRVFQQKLPEWTPNVLYYSSKEYPRRDHAQHYNVRGTLALPVFEPSIQSCVGVLELIMTSQKINYAPEVDKICKALETVNLRSSEILDHPHTQICNEGRQNALSEILEILTVVCETHNLPLAQTWIPCKHRSVLAQGGGVKKSCSSFDGRCMGKVCMSTTDIAFYIIDAHLWGFREACVEHHLQQGQGVAGRAFLSHGMCFCSNITQFYKTDYPLVHYALMFGLTSCFAICLRSSHTGNDDYVLEFFLPPRITHIHEQKTLLGSILAIMKQHFQSLHIASGVEPEDGSIEIIEATIERVHTRLESIPIASSIKSPPRPDTSPNMGEEVPQDPSEQQILMYCNDINNGGSLGENAARNIDHMPSLETKNINKPLERKRGKTEKSISLEVLQRYFAGSLKDAAKSLGVCPTTMKRICRQHGISRWPSRKINKVNRSLSKLKRVIESVQGAEGAFGLNSLSKSPLPIAVGSFPEPSTPNKFSLPASLSINPSEPQIKENELNASKALETNSQAVMEEDRLLGGRTPHLEKVINDKGRHTREVGKEPKRTRTGSGSSEDSTNPTSHGSCHDSPPNESSPVKNIFITSNNDQCAGLKRSPESTLQLTTNTPNRPAAYPMPDFVAAELQEPFGGMLIEDAGSSKDLRNLCPSVAETILEDMVPEACGTNIPGPDLSPKQSMGTPNKAVTPFVAMKEMKTVTIKATYREDIIRFRVSLTCGIVELKEEVAKRLKLEVGTFEIKYLDDDHEWVLIACDADLQECMDVSRSSGSKIIRVLVHDITSNLGSSCESSGE

SEQ ID NO: 443 - protein, 987 aa, Glycine soja
MSESKEENPDLLLKSKAQEEHGFVMDFGIGLEILWPLDHISLVSNPMPPFLFSTISEQPFSPVWAFSDAEDERQIRIAASGNTNTTTENPIENDDNKKTVPPLVAMTASENPDGYCLIKERMTQALRHFKELTEQNVLAQVWAPVRNGNRYALTTSGQPFVLDPHSNGLHQYRTASLMYMFSVDGENDEILGLPGRVFQHKIPEWTPNVQFYSSKEYQRLNHAQHYNVRGTLALPVFELAGQSCVAVVELIMTSQKINYAPEVDKICKALETVKLRSSEILEHPYNQICNEYRQYALAEILEILTAVCETHSLPLAQTWVPCKHRSVLAHGGGLKKICSSFNGCCMGQVCMSITEVAFYVIDAHKWGFHEACVEHHLQQGQGVAGRAFLSHNMCFCGNNTQFCKTEYPLVHYALMFHLNSCFAVCLQSSHTGNDDYVLEFFLPPGITDFNEQKRLLGSILATMKPHFQSLKIASGVELEGNASIEIIDARNERVHLRFESIPITQSSKSPPRHTSPNMGEGLPLEPSEPKIMAYFDGINDGGSLGDNAGGHIDQNTSLEIKTKKKPSDRKRGKAEISISLNVLQHYFTGSLKDAAKSLGVCPTTMKRICRQHGISRWPSRKIKKVNHSLSKLKCVIESVHGAEGAFGLNSLSTGSLPIAAGSFSDPFTSNKFHRQTTLTIRPSEPKINENDFDASGASETKRQVAMEDQFLGLEARTRSPEKVINDKGVSIQEIGTKGTNKFRTGSGSSGSGNPTHASCHGSPPNEFSPPKDTFVTGNSEQCLVLRGSLGSTTLHSTSTPNRATAYPMLHIVETTEPQEPFGGQLLEVAGSSKDLRNLCPSADAVLEDQVPEAYKMNPQCSDLPQMQHMDTLNKTMTPFAVRKEVNSVTIKATYKEDIIRFKISMDCGIVELKEEIAKRLKLEVGTFHNKYLDDDHEWVLIACDADLQECIDISRSSGGNIIRLVVHDILPILGSSCESSRDWKGCI

SEQ ID NO: 444 - protein, 991 aa, Glycine soja
MPESEEENQDYVPRSKPSEEAGGGCTMDFDLDLETSWPLDHMAFGSNPMSPFLFSTSSDQPYSPLWAFSDGEDPKLPASAFSDCHKIFSCDSNSIAEKPVENDDNKKLLPPLVPISPVENLDGYCVIKERMTQALRYFKELTELNVLAQVWAPVKNGNRYVLTTSGQPFVLDPHSNGLYQYRTVSLMYMFSVDGENDGSLGLPGRVFQQKLPEWTPNVLYYSSKEYPRRDHAQHYNVRGTLALPVFEPSIQSCVGVLELIMTSQKINYAPEVDKICKALETVNLRSSEILDHPHTQICNEGRQNALSEILEILTVVCETHNLPLAQTWIPCKHRSVLAQGGGVKKSCSSFDGRCMGKVCMSTTDIAFYIIDAHLWGFREACVEHHLQQGQGVAGRAFLSHGMCFCSNITQFYKTDYPLVHYALMFGLTSCFAICLRSSHTGNDDYVLEFFLPPRITHIHEQKTLLGSILAIMKQHFQSLHIASGVEPEDGSIEIIEATIERVHTRLESIPIASSIKSPPRPDTSPNMGEEVPQDPSEQQILMYCNDINNGGSLGENAARNIDHMPSLETKNINKPLERKRGKTEKSISLEVLQRYFAGSLKDAAKSLGVCPTTMKRICRQHGISRWPSRKINKVNRSLSKLKRVIESVQGAEGAFGLNSLSKSPLPIAVGSFPEPSTPNKFSLPASLSINPSEPQMKENELNASKALETNSQAVMEEDRLLGGRTPHLEKVINDKGRHTREVGKEPKRTRTGSGSSEDSTNPTSHGSCHDSPPNESSPVKNIFITSNNDQCAGLKRSPESTLQLTTNTPNRPAAYPMPDFVAAELQEPFGGMLIEDAGSSKDLRNLCPSVAETILEDMVPEACGTNIPGPDLSPKQSMGTPNKAVTPFVAMKEMKTVTIKATYREDIIRFRVSLTCGIVELKEEVAKRLKLEVGTFEIKYLDDDHEWVLIACDADLQECMDVSRSSGSKIIRVLVHDITSNLGSSCESSGE

SEQ ID NO: 445 - protein, 672 aa, Hordeum vulgare
  REGION 1..672: note = subsp. vulgare
MVMEVEADMERVLGGFSLRLSDRDDSDETGGGGGRGGGSHDEADGGGGAVKERIARALRLYKEASGGDGGALVQVWAPARDGERRRVLATRGQPFMLPSRCRRLLQYRTVSLTHVFAVGGGERERAAWEERGLPGRVFDARAPEWTPNVQFYGTGEYARMSYALIYDIQASLALPILDPADPRRCLAVLELVFTAAPAARFAAEAHNLCKALQAVSLRGSEICHPVPPTEVRAATCEPWICNSEATQAAMSEVSELLAAVREAHELPLAQAWVRCKQCNRTDVDDDGQHFSLTTAGAPFRLGSHYGGFREACTEHHLRRDQGLVGEAAIARAPRFCADVARRSKDAYPLAHYARMHGLAGCLAVPLRLPQSAMDDGRVEEEWVVLEFFLPPDCRSIAEQKAMVDAIAATVREECSGARLAMSGLQDLCLESILSDSDHAMVAGAANELNGRGDYDTNGSDEEDGDQAAGIHGTDQNGAEDCVPPQKTKKKTGRKAGRPISLNELQGYFSGSLKDAARSLGVCPTTMKRICRQHGISRWPFRKISKVNRALGKIRRAAIESVDCSRKQTTADASSSSSSSSSRRAPAPHLPCLSSALGEDTSSQDSSQDPPSSHQSHITQVSAAAQQWRGRGAGDHQGELQRGHHQVQSAVLYRRRSGEGGGGQEAGPRCACL

SEQ ID NO: 446 - protein, 1028 aa, Humulus lupulus
MSESEEVAATSFPPRSSKEVLMDFDLDLDNPWPMDQIAFVSNPMSPLLFSSSSTDHPFSPLWAFTDAENEENTTTTTTNNNNNSNNNNNNNNCSNTNSTNNINNTIKLGRLANSAVADSSRFSCNSNSVAERPAGNEENRSLPSPFSGLVPVDSPNGYYWIKERMTQALRYLKDSTDQHVLAQVWAPVKNGSRYVLTTSGQPFVLDPDSNGLHQYRMVSLMYSFSVDGETNGVLGLPGRVFRQKLPEWTPNVQYYSITEYPRLDHAQHYNVRGSLALPVFEPSGQSCVGVLELIMTSEKINYAPEVDKVCKALEAVNLRSAEILDHTDTQICNEGRQSALTEILEILTAACETHKLPMAQTWVPCMHRNVLAYGGGLKKNCTSIDGSCMGQVCMSTTEVAFYIVDARMWGFREACLEHHLQKGQGVAGRAFYSRNLCFSSDITQFCKNEYPLVHYARMFELTSCFAVCLQSSHTGNDNYVLEFFLPPNTNPSEQHTLLGSLLATIKKHFQSLKIASGIELEEEGFVEVVKVSATGGLESNFECIRIPQIAESPPGPCSLPNGGDMVQRDLLKPQLTVGHDAGNGGQDAVHDGGNMNHVSVSDNKETKKSERKRGKTEKSISLEVLQQYFAGSLKDAAKSLGVCPTTMKRICRQHGISRWPSRKINKVNRSLSKLKRVIESVQGAEGAFGLTPLATSPLPVAVTSVPRPSTSNGTIQQNSPCHVPCDLPLERKDSPTNSSSRREGHAEIEDQLQGGGISIQKDLIHENSGFYLPENNRGSNHSKTGSGSREVSGGTPTSHGSCQGSPANGSMMLKDPFAYSIHEQCIKVEGSPESALQPTDGYIFSVPDALVTTESQEPFGGMLVEDAGSSKDLRNLCHATDAILDESVPEYCWMNPPPPPPPPCSEFAPNDTTTDIIITQTQPNVKVSQEMRSVTIKATYREDIIRFRLSLSCNIVELREEVAKRLKLEVGTFDIKYMDDDQEWVLIACDADLQECMDVCRSSGSNMIRLLIHDIMPNLGSSCESTEE

SEQ ID NO: 447 - protein, 1010 aa, Jatropha curcas
MPEQEEDKSKGNQPPVVAGVGGGGVGGGVRGETLMDLDLDLESSWPLDQISFLSNPLSPLLLSSSDQPCSPLWAFSDTDDERLVASASSHATVPPLPAAAGLRLSDYPIFVTCNTASVNENPTENDDKRKLPSPLLGLMPIDNPDGYCIIKERMTQALRNFKDSTEQHVLAQVWAPVKNGGRYVLTTSGQPFVIDPHSNGLHQYRMVSLMYMFSVDGESDGELGLPGRVFRLKLPEWSPNVQYYSTKEYSRRDHALCYNVQGTLALPVFEPSGQYCVGVLELIMTSQKINYGPEVDKVCKALEAVNLKSSEILDHPGIQICNEGRKNALAEILEILTAVCETHKLALAQTWVPCMHRSVLAYGGGVKKSCTSFDGSCNGQVCMSTTDVAFYVVDPHMWGFREACLEHHLQKGQGVAGRAFSSHSACFCQDITQFCKTEYPLVHYARMFELTSCFAICLHSSHTGDDEYVLEFFLPSSISDIYEQKALLGSMLATMKQHFQSLKVASGMNLEEEEGFIEIVRTSMTGRLDLGLECIRIPQSPKTPPNTNTLSEGGHMAQIDSIRHQLVVDLAVVDNGGKFPTTHPDNKVNKRPSERKRGKTEKSISLEVLQQYFAGSLKDAAKSLGVCPTTMKRICRQHGISRWPSRKINKVNRSLSKLKRVIESVQGAEGAFDLTPLATSPLPVAVGSISWPSNLNGCNQRNSPISKSPEPNGERNGSPLCKTPESNVHAGVDGQLLGGGILSHEELVLQNRFSPELGQCSNRSKAGSGSREESTGTPTSHGSCQGSPANDSAPVKDLTGSPVHEQCNKVGCASELAFQPKRELNLSAAYTIPDALVVTKAQEPFGEMLIEDAGSSKDLRNLCPAVADAILDERVPESSWVPESGWVNHQCPDLSMAAIEHAMPHATARQEMRSITIKATYKEDIIRFRISLSSGIVELKEEVAKRLKLEVGTFDIKYLDDDQEWVLIACNADLQECIDVSRSSGCNIIRLSVHDVNALLGSSCESTGEL

SEQ ID NO: 448 - protein, 1041 aa, Juglans regia
MELEVEPYRPIRIISLSPTNQIPEIETASKMCGPEELNSCGLPPKSTGPQVVEEEEEEEEQEEEEEEAAAEEERVVEALIMDFDDLDGSWPLDQVSSVSDHNDDDKNNNQYPMSPLYLSCSDQAFSPLWAFLDGNDDASHATSAPPVCSALFPGTTIPVAERPVVNNFDDSRLPFPLMGLTPQENPDGCFVIKERMTLALRYFKDLTEQNVLAQVWVPVKNGSRYVLTTSGQPFVLDPHSNGLNQYRMVSQTYVFPVDEDNNGLLGLPGRVFCQRVPEWTPNVQYYSMLEYPRRNHAQNFNVRGSLALPVFEPSGESCVGVLELILTSAKINYAPEVDKVCKALEAVNLKSSQILDHPNTQICNEGRQNALAEILGILTVVCETHKLPLAQTWVPCMHRNILAYGGGLKKSCTSFDGSCMAQICMSTPDVALYVVDSQMWRFREACVQHHLKKGQGVAGRAFLSRSSCFCGNITLFCKTNYPLVHYARMFGLAGCFAICLRSTHTGDDDYILEFFLPPGITDFYEQQILLGSLLATMKQHFQSLKVASDIELEEEVSVEIVQVSEDGVDSRIESIRIPLSTKSTPRPDGLLDMGDMVQDSPKQQLMVHLDDINDKGTDVKNGGGSINNFSSLDIKEMKNKSQRKRGKTEKSISLEVLQQYFAGSLKDAAKSLGVCPTTMKRICRQHGISRWPSRKINKVNRSLTKLKRVIESVQGAEGTFSLNSLNPSPLPIRSNQQTSPCFKHSEPHEKNESPTRITLKSDEQDGMEDLLQGGRTFSPEKLVHDHSRSPPEVGKGSNGSKARSGSCEESAGTPTSHGSCQGGPPVESTALAKHLYVSSINDQCVKAGGDSPELAYPPTGPPNISAAYSLPDGILMTEPQETFGGMLIEDAGSSKDLRNLCPSVADAVLDEQAPEFCLPNPPCPNQSMPTLAPTTPHVTARKEMKNVTIKATYKEDIIRFRISLSSGILELKEEVAKRLKLEVGTFDIKYLDDDLEWVLIACDADLQECMDIPRSSGSNIIRLLVQDTISNLGSSCESSWD

SEQ ID NO: 449 - protein, 990 aa, Juglans regia
MGGPEEQSSGFPPKSPGPTVEVEEEEDRFEALVLDLDDLDGSWPLDQISLFSDHNHENNDNNLPMSPLCLSCSDQAFSPLWAFLDGNDYAKHPTSALPDCSGLLSGTPISIAERPMVNNDGKQRLPSPLIELVPLDNPDGYCAIKERMTQALRTFKDLTEQNVLAQVWVPVKNGSQYVLTTSGQPFVIGSHINGLHQYRMVSQMYMFPVDEETDGLPGLPGRVFQKRVPEWTPNVQFYSMLEYPRRNHAQNYNVHGTLALPVTEPSGQSCVAVLELIMTSAKINYAPEFDKVCKALETVNLKSSKILDCPSTQIRNEGRQNALAEILGILTVVCETHKLPLAQTWVPCRHRNILAHGGGLKKSCTSFDGSCMAQVCMSTTDVALYVVDAHMWRFREACVQHHLQKGQGVAGRAFLSHNSCFCGNVTLFCKTDYPLVHYARMFGLASCFAICLRSTHTGDDDYILEFFLPRGISDFYEQQILLGSLLATMKQHFQSLKVASGIELEEKVSVEIVQVSTGERVDSRLESVRIPPSTKSPPRPDGLPNMGDMVQVDSSKQQLMVHLNYINYNGAGSLNKFSPSENKEMRKTSERKRGKTEKSISLEVLQQYFAGSLKDAAKSLGVCPTTMKRICRQHGISRWPSRKINKVNRSLSKLKRVIESVQGAEGAFGLSSIHPSTLPARSNQQTSPCFKPSEPQEMNESPTLKNNHQQDDMGDQLQGERMLCPEKLVHDHSRFPPEVFKGSSRSKSRSSSCEESAGSPTSHGSCQVSPPNESTVPAKHPFVSSINEQCVNVGGSPELAYPTTSPLNMSATYSIPDVLLMTEPQETFEGMLIEDSGISKDLRNLCPSVADALLDEQVPEFCSTNPPCPNMAPNQSMAPLAHTMPHDRARKEMKSLTVKASYREDIIRFRISLGSCILELKEEVAKRLKLEVGTFEIKYLDDDHEWVLIACDADLQECMDISRLSGFNTIRLLVQDIMSNLGTSCESSGE

SEQ ID NO: 450 - protein, 875 aa, Juglans regia
MVNNDGKQRLPSPLIELVPLDNPDGYCAIKERMTQALRTFKDLTEQNVLAQVWVPVKNGSQYVLTTSGQPFVIGSHINGLHQYRMVSQMYMFPVDEETDGLPGLPGRVFQKRVPEWTPNVQFYSMLEYPRRNHAQNYNVHGTLALPVTEPSGQSCVAVLELIMTSAKINYAPEFDKVCKALETVNLKSSKILDCPSTQIRNEGRQNALAEILGILTVVCETHKLPLAQTWVPCRHRNILAHGGGLKKSCTSFDGSCMAQVCMSTTDVALYVVDAHMWRFREACVQHHLQKGQGVAGRAFLSHNSCFCGNVTLFCKTDYPLVHYARMFGLASCFAICLRSTHTGDDDYILEFFLPRGISDFYEQQILLGSLLATMKQHFQSLKVASGIELEEKVSVEIVQVSTGERVDSRLESVRIPPSTKSPPRPDGLPNMGDMVQVDSSKQQLMVHLNYINYNGAGSLNKFSPSENKEMRKTSERKRGKTEKSISLEVLQQYFAGSLKDAAKSLGVCPTTMKRICRQHGISRWPSRKINKVNRSLSKLKRVIESVQGAEGAFGLSSIHPSTLPARSNQQTSPCFKPSEPQEMNESPTLKNNHQQDDMGDQLQGERMLCPEKLVHDHSRFPPEVFKGSSRSKSRSSSCEESAGSPTSHGSCQVSPPNESTVPAKHPFVSSINEQCVNVGGSPELAYPTTSPLNMSATYSIPDVLLMTEPQETFEGMLIEDSGISKDLRNLCPSVADALLDEQVPEFCSTNPPCPNMAPNQSMAPLAHTMPHDRARKEMKSLTVKASYREDIIRFRISLGSCILELKEEVAKRLKLEVGTFEIKYLDDDHEWVLIACDADLQECMDISRLSGFNTIRLLVQDIMSNLGTSCESSGE

SEQ ID NO: 451 - protein, 976 aa, Lotus japonicus
MSESDEEKPDFPQKARPTEEPGFAMDFDLDLESSWPMDHMSFVSNPMSPFLFSTMSDQPCSPLWAFSDGEDDRHTSLAAPAFSDCHKIFPCDSNSVTEKPMENDDNNKLLPPVVPQPPIENLDRFCVIKERMTQALRHFKELTELNVLAQVWAPVRNGNRYVLTTSGQPFVLDPHSNGLHQYRTASLMYMFSADGENDGTLGLPGRVFQHKLPEWTPNVLYYSNKEYPRRDHAEHYNVRGTLALPVFEPALQSCVGVLELIMTSQKINYGPEVEKICKALEAVNLKSSEILEPPYTQICNEGRQNALSEILEILTVVCETHNLPLAQTWVPCRHRSVLAHGGGLKKICSSFDGSCMGQVCMSITDVASYIIDPHLWGFREACVEHHLQQGQGVAGRAFSSHSMCFCPNITQFCKTDYPLVHYALMFGLTSCFAICLRSSHTGDDDYVLEFFLPPRITHFSEQKTLVGSILATMKQHFQSLKIAAGVELEDGGSVEIIEATNERVTLRLESIPIAQSVQSPPGPGGSPNMVEEVPKDPSEQQTMMNCNDMNEGGAHGDNAGGNIDQMSSLETKTMKKPSERKRGKTEKSISLEVLQRYFAGSLKDAAKSLGVCPTTMKRICRQHGISRWPSRKINKVNRSLSKLKRVIESVQGAEGAFGLNSLSTSPLPVVGSFPEPSTPNKFSQQASMRPLESQMKENEIDASKILEIEDPLLGGMTQNLEKVFNDKGPRRIRTGSGSSEDSTNPTSHGSCYGSPPIESSHVKDISITSNNERCVVPRGSPESSPLQPINTLNSPSPIPIPDIVLTELQEPFGGMLIEDAGSSKDLRNLCPSAAEAILEDQVPEACPTNNPPGCSSLAPKRPVDTLGKTVTPFAAKKEMKTVTIKATYREDIIRFRVSLTCGIVELKEEVSKRLKLEVGTFDIKYLDDDQEWVLIACDADLQECIDVSRSSASHIIRVLVHDITSNLGSSCESSGE

SEQ ID NO: 452 - protein, 979 aa, Lupinus angustifolius
MTEPEEENPLDFDLEMENPWPLDNMATSPFVFSTSTSSPVWVFSDVEDDSFVKVAPSPFSDCYKISCDSNSIAEKPEENDDSNKLLPPLVAMPPLENVDWYYVVKEKMTQALRYFKQLTEQNVLAQVWAPVRNGNCYVLTTAGQPFVLDPHSNGLNQYRTVSLMYMFPVDGENDGSPGLPGRVFQKKLPEWSPDVQYYSSKEYPRRDYAQHYNVRGTLALPVFEPSLHSCVGVVELIMTSQKINYAPEVDKICKSLEIFPHSPVVSFLAGSKFEEFGNSGASIHSDITWQCLLNQICNEGRQNALAEILEILTAVCETHNLPLAQTWVPCKHRSVLANGGGLKKVCSSFDGSCMGQVCMSTTDVASYIIDPHLWGFREACVEHHLQQGQGVAGRAFLSHNMCFCSNITQFCKTDYPLVHYALMFGLTSCFAICLRSSHSEEDDYVLEFFMPPRITDFHEQKTLLGSILRTMKQHFQSLKIAAGVELEENGSIEIIEATNEGVHFTLESIPIDRSTKSPLIPDYAPNIVEEIPEDPSEQQIMMYCNDINDGEDFGDNARGSIDQMSLLKTKTIKKPSERKRGKTEKSISLEVLQRYFAGSLKDAAKSLGVCPTTMKRICRQHGISRWPSRKINKVNRTLSKLKRVIESVHSAEGAFDLNSLSTSPLPDVVGSFPEPFTPNKFSQQAILCTRPSEPQMKQNEFDTLKISERSRQDVMEDQLLGTIQSLEKVINDRGDPKRTVTKSSSSEDSTNPTSHGSCHFSPPNESPPVKDILFASNNEQGVALRELPELAFQPTNTLNFPSDYPIPNIAPAELQQQPFREMLIEDAGSSEDFRNLCPSITDAILEDLIPEACGTNLPCSDLAPRQSLHTLNNAVTPADRKEIKNVTIKATYKQYIIRFRVSLTCSIVDLREEVAKRLKLEVGTFDIKYLDDDNEWVLIACDADMQECMDVSSSGSNIVRVLVHDLISNLGSSHERGGE

SEQ ID NO: 453 - protein, 957 aa, Lupinus angustifolius
MTEPEEENPLDFDLEMENPWPLDNMATSPFVFSTSTSSPVWVFSDVEDDSFVKVAPSPFSDCYKISCDSNSIAEKPEENDDSNKLLPPLVAMPPLENVDWYYVVKEKMTQALRYFKQLTEQNVLAQVWAPVRNGNCYVLTTAGQPFVLDPHSNGLNQYRTVSLMYMFPVDGENDGSPGLPGRVFQKKLPEWSPDVQYYSSKEYPRRDYAQHYNVRGTLALPVFEPSLHSCVGVVELIMTSQKINYAPEVDKICKSLEAVNLRSSEILEHPYIQICNEGRQNALAEILEILTAVCETHNLPLAQTWVPCKHRSVLANGGGLKKVCSSFDGSCMGQVCMSTTDVASYIIDPHLWGFREACVEHHLQQGQGVAGRAFLSHNMCFCSNITQFCKTDYPLVHYALMFGLTSCFAICLRSSHSEEDDYVLEFFMPPRITDFHEQKTLLGSILRTMKQHFQSLKIAAGVELEENGSIEIIEATNEGVHFTLESIPIDRSTKSPLIPDYAPNIVEEIPEDPSEQQIMMYCNDINDGEDFGDNARGSIDQMSLLKTKTIKKPSERKRGKTEKSISLEVLQRYFAGSLKDAAKSLGVCPTTMKRICRQHGISRWPSRKINKVNRTLSKLKRVIESVHSAEGAFDLNSLSTSPLPDVVGSFPEPFTPNKFSQQAILCTRPSEPQMKQNEFDTLKISERSRQDVMEDQLLGTIQSLEKVINDRGDPKRTVTKSSSSEDSTNPTSHGSCHFSPPNESPPVKDILFASNNEQGVALRELPELAFQPTNTLNFPSDYPIPNIAPAELQQQPFREMLIEDAGSSEDFRNLCPSITDAILEDLIPEACGTNLPCSDLAPRQSLHTLNNAVTPADRKEIKNVTIKATYKQYIIRFRVSLTCSIVDLREEVAKRLKLEVGTFDIKYLDDDNEWVLIACDADMQECMDVSSSGSNIVRVLVHDLISNLGSSHERGGE

SEQ ID NO: 454 - skipped

SEQ ID NO: 455 - protein, 819 aa, Malus x domestica
MLPSTPPNLKNEREDALMDFDFDLDVLWPLDPIHFLSYPTSPLLLPPNDQPCTPLWAFSDGDVESDYKLAGHVGQALSDCSQFVSCNSNSVTEGSTETESNRMLPSPFSGLEPLESSDGYSLFNEKITQALRYLKELTDQPVLAQFWAPVKDGNRYVLTTLGQPFVLDPQCIRLHQYRMACLMYMFSVDGESDGVLGLPGRVFQHKLPEWTPNVQYYSIKEYARLRHAQQYNVQGTLALPVFEPSGRSCVGVLELIMISPLINYGPEVDKAVGLKSSEILDHPSRQVSCSNEYMLATSCIQIQICNEGRQTALAEILKILIVVSETHKLPLAQTWVPCMHRNVLAYDGGLKKSCTSFDGSSMEQVCMSTTDVAFYIVDAHMWHFRDACVEHHLHKGQGVAGRAFLSHNACFCEDITQFCKSEYPVAHYARMFGLAGSFAICLQSTHTGNDDYILEFFLPPSITDSHEQQTLLGSILAIMKNHFRSLSVASGIVLEEEGIVEIVQASKNNGLATRLQCILIPRSVESPPGPALPYREEMVQLDSSKPQLVVGYDVANDGRNYVHEGGENNISFPENKDIKKKPEKKRGKAEKSISLDVLQQYFAGSLKDAAKSLGVCPTTMKRICRHHGISRWPSRKIKKINHSLTKLQRVIESVHGAEGAFGLTPLTASGSISRPWILNGTEGRAGIDNHLLDERMLSYEELLLEHNRCLRDRGKGSNTSNRGNSSTEASACTSTCHGSFQGSPGNGIAMVNPPFSDSAPKQSNTMPHITGRQEMKSVTIKATYKEDIIRFRVSMSSGFVDMKEIKTGRGHIRHQMCGL

SEQ ID NO: 456 - protein, 999 aa, Manihot esculenta
MPEQEDDKSKENQTVGGDKGETLMDLDLDLDTSWPLDQISYLSNPLSPLLLSSSDQPCSPLWAFSDADDDRLLPVSSASHATTPPLRFSDYPIFLACAPNSVAENHTENDDKRKFPSPLLGLMPFDNPDGYCVIKERMTLALRKFKESTEQHVLAQVWAPTKNGGRYVLTTSGQPFVIDPHSNGLHQYRMVSLMYMFSVDGDCEGELGLPGRVFRQKLPEWTPNVQYYSSKEYSRRDHALHYNVQGTLALPVFEPFGQSCVGVLELIMTSQKINYGPEVNKVCKALEAVNLRSSEILDHPSTQICNEGRRNALAEILEILTVVCETHKLALAQTWVPCMHRSVLAFDGGLKKSCTSFDGSCNGQVCMSTTDVAFYVVDPHMWGFREACLEHHLQKGQGVAGRAFLSHNACFCPDITQFCKTEYPLVHYARMFGLSGSFAICLRSSYTGNDNYVLEFFWPLSISDNYEQNALLGSLVATMKQHFQSLKVASGMDLEEEEGFVEIIQTSMSGRLDLRLECIRIPQSPKSPPNLNTSPKEGKTAQLDPLKHHLMVNLDAVDNGGNISQAEGSHFPTSLPENKGNKKPSERKRGKTEKSISLEVLQQYFAGSLKDAAKSLGVCPTTMKRICRQHGISRWPSRKINKVNRSLSKLKRVIESVQGAEGAFDLTPLTSPLPVTVGSISWPSNLNGCNQQNSLNSKSLEPIDEKNGSPICNAAGNDGQGGGEAQLLGGRILSREEAVLQNGFSPKIGLVSDRFKAGNASGEESTGTPTSHGSCQGSPANDSAPANDSPVSPVHEKCKNAGNTPELAFQTKGKLNLSAAYSVPDALVATEAQAPLGEMLIKDAGSSKDLRNLCPSVADTILEERVPESSWTNYPGPDFPTTEAVAALEHAMTQGTTRQEMMTITIKAAYREDIIRFRISLSSGIVELKEEVAKRLKLEVGTFDIKYLDDDHEWVLIACDADLQECIDISRSSGSSIIRLSVHDVNTNLGSSCESNGEL

SEQ ID NO: 457 - protein, 1002 aa, Manihot esculenta
MAEQEDDKSKDNQSVAGNKGETLMDLDLDLDTSWPLDQIYFLSNPLSPLLLSSSDQPCSPLWAFSDADDERLAASSSSHATHPLRLSDYPIFLTCNPSSLAESQTENDDKRKLPSPLLGLMPFDNPDGYCIIKERMTQALRNFKESTEQHVLAQIWAPVKNGARYVLTTSGQPFVIDPHSNGLHQYRMVSLTYIFSLDGEFECEPGLPGRVFRQKLPEWTPNVQYYSSKEYSRRDHALHYNVQGTLALPVFEPSGQSCVGVIELIMTSQKINYGPEVDKVCKALKAVNLKSSEILDHPSTQICNEGRKNALAEILEILTVVCETHKLALAQTWIPCMHRSVLAFGGGLKKSCTSFDGSCNGQVCMSTTDVAFYVVDPHMWGFREASLEHHLQKGQGVTGRAFLSHNACFCPDITQFCKTEYPLVHYARMFGLTGCFAICLRSSHTGDDEYILEFFLPPGISDVFQQKALLGSLLATMKQHFQSLKVASGMDLEEEEGFVEIIQTSVSGKLDLRLECIQTPESPESLPNVNTSPKEGQMAQVDPVVNLDVVNNGGSTGDAEGGHFPTSPPENKGNKKPSERKRGKTEKTISLEVLQQYFSGSLKDAAKSLGVCPTTMKRICRQHGISRWPSRKINKVNRSLSKLKRVIESVQGAEGTFDLTPIATSPLPVAFGSISWPSNLNGCNQQNSPNSRSSEPNNERNGFPICKVAGSEEQSGSENQLPGGRVISHEELFLQNCFSPEIGQGSSRHKAGNVSREESAGTPTSHGSCQGSLANDIAPAKVASASPVQEQGNEVGTIPELSFQPKGKPNLSALYPIPDAFVATEAQAPFRERLIEDAGSSKDLRNLCPSVADTMLEERVPEYSWTNHPGPEFPTKQSMAALEHATPRVTARQEMRFVTIKATYREDIIRFRISVGSGITELKEEVAKRVKLEVGSFDIKYLDDDHEWVLIACDADLHECIDISRLSGGNIIRLSIHDVNTNLGSSCESNGELLLGCTYGKV

SEQ ID NO: 458 - protein, 1067 aa, Manihot esculenta
MESHTANYPPKPHKFTPFSLSSCLYIIIHIRSSHIRILGDKSFSGKSISSSSSSSPPTATAVFSFVDEMPEQEDDKSKENQTVGGDKGETLMDLDLDLDTSWPLDQISYLSNPLSPLLLSSSDQPCSPLWAFSDADDDRLLPVSSASHATTPPLRFSDYPIFLACAPNSVAENHTENDDKRKFPSPLLGLMPFDNPDGYCVIKERMTLALRKFKESTEQHVLAQVWAPTKNGGRYVLTTSGQPFVIDPHSNGLHQYRMVSLMYMFSVDGDCEGELGLPGRVFRQKLPEWTPNVQYYSSKEYSRRDHALHYNVQGTLALPVFEPFGQSCVGVLELIMTSQKINYGPEVNKVCKALEAVNLRSSEILDHPSTQICNEGRRNALAEILEILTVVCETHKLALAQTWVPCMHRSVLAFDGGLKKSCTSFDGSCNGQVCMSTTDVAFYVVDPHMWGFREACLEHHLQKGQGVAGRAFLSHNACFCPDITQFCKTEYPLVHYARMFGLSGSFAICLRSSYTGNDNYVLEFFWPLSISDNYEQNALLGSLVATMKQHFQSLKVASGMDLEEEEGFVEIIQTSMSGRLDLRLECIRIPQSPKSPPNLNTSPKEGKTAQLDPLKHHLMVNLDAVDNGGNISQAEGSHFPTSLPENKGNKKPSERKRGKTEKSISLEVLQQYFAGSLKDAAKSLGVCPTTMKRICRQHGISRWPSRKINKVNRSLSKLKRVIESVQGAEGAFDLTPLTSPLPVTVGSISWPSNLNGCNQQNSLNSKSLEPIDEKNGSPICNAAGNDGQGGGEAQLLGGRILSREEAVLQNGFSPKIGLVSDRFKAGNASGEESTGTPTSHGSCQGSPANDSAPANDSPVSPVHEKCKNAGNTPELAFQTKGKLNLSAAYSVPDALVATEAQAPLGEMLIKDAGSSKDLRNLCPSVADTILEERVPESSWTNYPGPDFPTTEAVAALEHAMTQGTTRQEMMTITIKAAYREDIIRFRISLSSGIVELKEEVAKRLKLEVGTFDIKYLDDDHEWVLIACDADLQECIDISRSSGSSIIRLSVHDVNTNLGSSCESNGEL

SEQ ID NO: 459 - protein, 691 aa, Medicago truncatula
MLLNQICNEGRQNALSEILEILTVVCETHNLPLAQTWVPCRHRSVLAHGGGFKKSCSSFDGSCMGQVCMSTTEAAAYIVDAHLWGFREACVEHHLQQGQGVAGRAFLSQTMSFCTNITQFCKTDYPLVHYALMFGLTSCFAICLRSFHTGNDDYVLEFFLPPGITEFHEQKTLLGSIFSTMKQHFQSLNIAAGVELEENGSIEIIEATDEGIRLRTESIPIAQSIKSPPRPDASPNMEDEEEGVPQDPSEVRGENVGGSVDPMSTLGNKNIKKPSERKRGKTEKSISLEVLQRYFAGSLKDAAKSLGVCPTTMKRICRQHGISRWPSRKINKVNRSLSKLKRVIDSVQRAEGAFDLNSLGNNQLPIVSSFPEPSTLNKSSQQGSLSNRPSEPQMKENEFDASKVSETNLQIVMENQLLGGRKHSLEKEVINGKGVTIQEIGKDRKRNRTRSGSSEDSTNPTSHGSCHGSPPIEIPTIKDLFIPSNNEQHVVLRRSPEPGMQPTNALNSPTAHRMVDNVIAELQEPFGGLLIEDAGSSKDLRNLCPSVAEAILEDMAPEACGNNFPGSSHLAPPKQCIDTINNSATPFAARKEMKTVTIKATYREDIIRFRVSLNCGIVELKEEVSKRLKLEVGTFDIKYMDDDNEWVLIACDADLQECMYLSRSSGGSNIIRVLVHDITSNLGSSCESSGE

SEQ ID NO: 460 - protein, 979 aa, Medicago truncatula
MSEPEEENQDFPPKTKTSLEEHGCSMDFDLDLETSWPLDHMSFITNPMSPFLFSNISDQPSSPLWTFTDGEDGKLAASALSDCHKIFSCDSNSITEKLVEKDDNKTLLPPLLPPIENLDGYCVIKEKMTQALRYFKEWTELNVLAQVWAPVRNGNRYVLTTSGQPFVLDPHSNGLNQYRTVSLMYMFSVDGENDGTLGLPGRVFQQKLPEWSPNVLYYSNKEYPRRDHAQHYNVRGTLALPVFEPSLQSCIGVIELIMTSLKINYAPEVEKICKALEAVNLRSSEFLDHPFTQICNEGRQNALSEILEILTVVCETHNLPLAQTWVPCRHRSVLAHGGGFKKSCSSFDGSCMGQVCMSTTEAAAYIVDAHLWGFREACVEHHLQQGQGVAGRAFLSQTMSFCTNITQFCKTDYPLVHYALMFGLTSCFAICLRSFHTGNDDYVLEFFLPPGITEFHEQKTLLGSIFSTMKQHFQSLNIAAGVELEENGSIEIIEATDEGIRLRTESIPIAQSIKSPPRPDASPNMEDEEEGVPQDPSEVRGENVGGSVDPMSTLGNKNIKKPSERKRGKTEKSISLEVLQRYFAGSLKDAAKSLGVCPTTMKRICRQHGISRWPSRKINKVNRSLSKLKRVIDSVQRAEGAFDLNSLGNNQLPIVSSFPEPSTLNKSSQQGSLSNRPSEPQMKENEFDASKVSETNLQIVMENQLLGGRKHSLEKEVINGKGVTIQEIGKDRKRNRTRSGSSEDSTNPTSHGSCHGSPPIEIPTIKDLFIPSNNEQHVVLRRSPEPGMQPTNALNSPTAHRMVDNVIAELQEPFGGLLIEDAGSSKDLRNLCPSVAEAILEDMAPEACGNNFPGSSHLAPPKQCIDTINNSATPFAARKEMKTVTIKATYREDIIRFRVSLNCGIVELKEEVSKRLKLEVGTFDIKYMDDDNEWVLIACDADLQECMYLSRSSGGSNIIRVLVHDITSNLGSSCESSGE

SEQ ID NO: 461 - protein, 979 aa, Medicago truncatula
MSEPEEENQDFPPKTKTSLEEHGCSMDFDLDLETSWPLDHMSFITNPMSPFLFSNISDQPSSPLWTFTDGEDGKLAASALSDCHKIFSCDSNSITEKLVEKDDNKTLLPPLLPPIENLDGYCVIKEKMTQALRYFKEWTELNVLAQVWAPVRNGNRYVLTTSGQPFVLDPHSNGLNQYRTVSLMYMFSVDGENDGTLGLPGRVFQQKLPEWSPNVLYYSNKEYPRRDHAQHYNVRGTLALPVFEPSLQSCIGVIELIMTSLKINYAPEVEKICKALEAVNLRSSEFLDHPFTQICNEGRQNALSEILEILTVVCETHNLPLAQTWVPCRHRSVLAHGGGFKKSCSSFDGSCMGQVCMSTTEAAAYIVDAHLWGFREACVEHHLQQGQGVAGRAFLSQTMSFCTNITQFCKTDYPLVHYALMFGLTSCFAICLRSFHTGNDDYVLEFFLPPGITEFHEQKTLLGSIFSTMKQHFQSLNIAAGVELEENGSIEIIEATDEGIRLRTESIPIAQSIKSPPRPDASPNMEDEEEGVPQDPSEVRGENVGGSVDPMSTLGNKNIKKPSERKRGKTEKSISLEVLQRYFAGSLKDAAKSLGVCPTTMKRICRQHGISRWPSRKINKVNRSLSKLKRVIESVQGAEGAFDLNSLGNNQLPIVSSFPEPSTLNKSSQQGSLSNRPSEPQMKENEFDASKVSETNLQIVMENQLLGGRKHSLEKEVINGKGVTIQEIGKDRKRNRTRSGSSEDSTNPTSHGSCHGSPPIEIPTIKDLFIPSNNEQHVVLRRSPEPGMQPTNALNSPTAHRMVDNVIAELQEPFGGLLIEDAGSSKDLRNLCPSVAEAILEDMAPEACGNNFPGSSHLAPPKQCIDTINNSATPFAARKEMKTVTIKATYREDIIRFRVSLNCGIVELKEEVSKRLKLEVGTFDIKYMDDDNEWVLIACDADLQECMYLSRSSGGSNIIRVLVHDITSNLGSSCESSGE

SEQ ID NO: 462 - protein, 857 aa, Medicago truncatula
MQKSEEENHDLPQKSKPLDENVFSMDYDIDFETSWPLDHISNSMHPFFLQNISEQPFSPIWTFSDDDHNIAASGNNKNIITENRVENDDKHKRVTPHIGLPPLQNPHGYCLIKERMTQALRNFKELTELNVLAQVWAPVRNGSRYKLTTSGQPFVLDAHSNGLHQYRTVSLMYMFSVDGENDEVLGLPGRVFQQKLPEWTPNVQYYSSKEYSRLNHALHYNVRGTLALPVFEPPGQSCVAVLELIMTSQKINYAPEVDKVCKALEAVNLRSSEILEHPYSQICNEDRQNALSEILEILTVVCETHNLPLAQTWVPCRHRSVLAHGGGLKKNCSSFDGYCMGQVCMSITEVAFYIIDSHTWGFHDACVEHHLQQGQGVAGRAFLSQNMCFCRNITQFCKTDYPLVHYALMFDLTSSFSICLQSSHTGGDDYVLEFFLPPSINKFCEQKGLLGSILATMKQNFQSLKVASGVELEEDGSVEIVEIINGTVHSRLESVPIIQSTKLSARHDDASPDMEEGVPLDQSRQKIITNFDDINDIGNLDDYAGGSIDQIHSLKTETKKKPSLRKRGKAEKSISLEVLQDYFSGSLKDAAKSLGVCPTTMKRICRQHGISRWPSRKIKKVNRSLSKLKCVIESVHGVEGAFGLDSPSTSTIPIAAGSFNEPSTSNKFEHHTSLSIMPSEPKKNENYLDASKSEPQKPLGGMLIEGADSSKDLKNLCPSTDVVLEDQVLEASRIHPPCSDFVHMQMQHMDTLNFAAQKEMKIVTIKATYRDDIIRFRVSWNCGIVELREEIAKRLKLEVGTFDIKYLDDDQEWILVACDADLQECMDILTLSGSNIIRLVVHDILSILGSSVESSGE

SEQ ID NO: 463 - protein, 742 aa, Medicago truncatula
MTQALRNFKELTELNVLAQVWAPVRNGSRYKLTTSGQPFVLDAHSNGLHQYRTVSLMYMFSVDGENDEVLGLPGRVFQQKLPEWTPNVQYYSSKEYSRLNHALHYNVRGTLALPVFEPPGQSCVAVLELIMTSQKINYAPEVDKVCKALEAVNLRSSEILEHPYSQICNEDRQNALSEILEILTVVCETHNLPLAQTWVPCRHRSVLAHGGGLKKNCSSFDGYCMGQVCMSITEVAFYIIDSHTWGFHDACVEHHLQQGQGVAGRAFLSQNMCFCRNITQFCKTDYPLVHYALMFDLTSSFSICLQSSHTGGDDYVLEFFLPPSINKFCEQKGLLGSILATMKQNFQSLKVASGVELEEDGSVEIVEIINGTVHSRLESVPIIQSTKLSARHDDASPDMEEGVPLDQSRQKIITNFDDINDIGNLDDYAGGSIDQIHSLKTETKKKPSLRKRGKAEKSISLEVLQDYFSGSLKDAAKSLGVCPTTMKRICRQHGISRWPSRKIKKVNRSLSKLKCVIESVHGVEGAFGLDSPSTSTIPIAAGSFNEPSTSNKFEHHTSLSIMPSEPKKNENYLDASKSEPQKPLGGMLIEGADSSKDLKNLCPSTDVVLEDQVLEASRIHPPCSDFVHMQMQHMDTLNFAAQKEMKIVTIKATYRDDIIRFRVSWNCGIVELREEIAKRLKLEVGTFDIKYLDDDQEWILVACDADLQECMDILTLSGSNIIRLVVHDILSILGSSVESSGE

SEQ ID NO: 464 - protein, 899 aa, Medicago truncatula
MASWLELPGDSNSITEKLVEKDDNKTLLPPLLPPIENLDGYCVIKEKMTQALRYFKEWTELNVLAQVWAPVRNGNRYVLTTSGQPFVLDPHSNGLNQYRTVSLMYMFSVDGENDGTLGLPGRVFQQKLPEWSPNVLYYSNKEYPRRDHAQHYNVRGTLALPVFEPSLQSCIGVIELIMTSLKINYAPEVEKICKALEAVNLRSSEFLDHPFTQICNEGRQNALSEILEILTVVCETHNLPLAQTWVPCRHRSVLAHGGGFKKSCSSFDGSCMGQVCMSTTEAAAYIVDAHLWGFREACVEHHLQQGQGVAGRAFLSQTMSFCTNITQFCKTDYPLVHYALMFGLTSCFAICLRSFHTGNDDYVLEFFLPPGITEFHEQKTLLGSIFSTMKQHFQSLNIAAGVELEENGSIEIIEATDEGIRLRTESIPIAQSIKSPPRPDASPNMEDEEEGVPQDPSEVRGENVGGSVDPMSTLGNKNIKKPSERKRGKTEKSISLEVLQRYFAGSLKDAAKSLGVCPTTMKRICRQHGISRWPSRKINKVNRSLSKLKRVIDSVQRAEGAFDLNSLGNNQLPIVSSFPEPSTLNKSSQQGSLSNRPSEPQMKENEFDASKVSETNLQIVMENQLLGGRKHSLEKEVINGKGVTIQEIGKDRKRNRTRSGSSEDSTNPTSHGSCHGSPPIEIPTIKDLFIPSNNEQHVVLRRSPEPGMQPTNALNSPTAHRMVDNVIAELQEPFGGLLIEDAGSSKDLRNLCPSVAEAILEDMAPEACGNNFPGSSHLAPPKQCIDTINNSATPFAARKEMKTVTIKATYREDIIRFRVSLNCGIVELKEEVSKRLKLEVGTFDIKYMDDDNEWVLIACDADLQECMYLSRSSGGSNIIRVLVHDITSNLGSSCESSGE

SEQ ID NO: 465 - protein, 987 aa, Mucuna pruriens
MSESEEEKPDYVPTSKAAEEVGCSMDFDLDLESSWPLDHMAFVSNPMSPLLFSTSSDQPYSPLWAFSDDGEDDRHPKLPLSAFSDCHKIFPCDSNSIAEKPLNDDKEKLLPPLVPPPPVENLDGYCVIIKERMTQALRHFKELTELNVWAPVKNGNRYVLTTSGQPFVLDPHSNGLHQYRTVSLMYMFAVDGENDGSLGLPGRVFQQKLPEWTPNVLYYSSKEYPRRDHAQHYNVRGTLALPVFEPALQSCVGVLELIMTSQKINYAPEVDKICKALEIHQSRAVSFLADSKFEEFGNFGASIYSGRQNALSEILEILTVVCETHNLPLAQTWIPCRHRSVLTQGGGIKKSCSSFDGSCMGKVCMSTTDIACYIIDAHLWGFREACVEHHLQQGQGVAGRAFLSHGMCFCSNITQFCKTDYPLVHYALMFGLTSCFAICLRSSHTGNDDYVLEFFLPPRVADSCEQKTLLGSILATMKQHFQSLKLASGVELEDRSIEIIEATIERVHTRLESIPIAPSIKSPPRHDTSPNMVEEVPSEQQILMYCNDINDGGSLGDNAGVNIDHMPSLETKNIKKPLERKRGKTEKSISLEVLQRYFAGSLKDAAKSLGVCPTTMKRICRQHGISRWPSRKINKVNRSLSKLKRVIESVQGAEGAFGLNSLNTSPLPTAVGSFPEPSTPNKFSQPTSLSIRPSEPQMKDNELNVSKVLETNRQAEMEDQFLGGKTQNLEKAINDRGWCTQEVGKEPKRTRTGSGSSEDSTNPTSRGSCHDSPPNESSPVKDIFITSNNDQCAVLRLSPESTLQPTTNTLNLPTAYPMLDFVAAELQEQFGGMLVEDAGSSKDLRNLCPSVAEAILEDLVPEACGRTSPPGLDLSPKQSMDTPNKAVTPFAARKEMKTVTIKATYREDIIRFRVPLMCGIGELKEEVAKRLKLEAGTFDIKYLDDDHEWVLIACDADLQECMDVSRSSGSNIIRVLVHDIMSNLKVE

SEQ ID NO: 466 - protein, 984 aa, Mucuna pruriens
MSESKEENPDLPPKSKPQEEHGFDMDFDIGLESLWPLDHISLVSNPMSPFLLSTISEQPFSPVWAFSDVEDDRQIRIAASGNTNRIITEKAVENDDNKKSVSGLAALAASENPDGYCLIKERMTQALRHFKELSEQNVLAQVWAPVRNGNRYALTTSGQPFVLDPHSNGLHQYRTVSLMYTFSVDGENDEILGLPGRVFQHKIPEWTPNVQYYSSKEYQRLNHAQHYNVRGTLALPVFEPAGHACVAVVELIMTSQKINYAPEVDKICKALEAVNLRSSEISEHPYNQICNEDRQYALAKILEILTVVCETHSLPLAQTWVPCKHRSVLAHGGGLKKICSSFDGCCMGQVCMSITEAAFYVIDAHTWGFHEACIEHHLQQGQGVAGRAFLSHNMCFCGNITQFCKTDYPLAHYALMFGLTSSFAVCLQSSHTGNDDYVLEFFLPPRITDFNEQKSLLGSILATMKSHFQSLKIAAGVELEENGSVEIIEARNERVHLRFESIPITQSSKSSLPRHASPIVGEELPLEPLEQQIMAYFDDINDGGSLGDNAGGHIDQNTYLETKTKKKPSERKRGKAEKSISLDVLQHYFTGSLKDAAKSLGVCPTTMKRICRQHGISRWPSRKIKKVNRSLSKLKCVIESVHGAEGAFGLNSLSRTSLPIAAGSFSEPSTSNKFNRQTSLTIRLSEPKMNENDFDASRASESNRHAVIEDHFLGARTQRPEEIGAIQEIGTKGTNKFRTGSGSSESSANPTPHGSCHGSPPNEISPAKDIFVTGNSEQCLVFRGSLEPTLLSTSTPNRATAYPMPNIVETTEPQEPFGGQLLEGAGSSKDLRNLCPSTDAVLEDQVPEACRMNPQCSDLAPVQQHMDTLNNTVTPFAVRKEVKSVTIKATYKEDIIRFKVSLNCGIVELKEEIAKRLKLEVGTFDIKYLDDDNEWVLIACDADMQECMDISRPSGSNVIRLVVHDILSILGSSSGSSGDWKGCT

SEQ ID NO: 467 - protein, 938 aa, Oryza sativa
MEVDPSSSLPGAGEGGGGGIGGGGGDLWPFDSLTTSLLFSSVSASPQPLPASSSSWLTPPSPLWLFDERQLLPLDMGAPAAPATAPPAEAAAVVEEVHRTRSGNSDTTSKRVDQINSKWQFHLSIDDNTDSSCLFKERLTQALRYFKESTDQHLLVQVWAPVKSGDRYVLTTSGQPFVLDQQSIGLLQYRAVSMMYMFSVDGENAGELGLPGRVYKQKVPEWTPNVQYYSSTEYPRLNHAISYNVHGTVALPVFDPSVQNCIAVVELIMTSKKINYAGEVDKVCKALEAVNLKSTEILDHPNVQICNEGRQSALVEILEILTVVCEEHKLPLAQTWVPCKYRSVLAHGGGVKKSCLSFDGSCMGEVCMSTSDVAFHVIDAHMWGFRDACVEHHLQKGQGVSGKAFIYRRPCFSKDISQFCKLEYPLVHYARMFGLAGCFAICLQSMYTGDDDYILEFFLPPNCRNEDDQNALLESILARMKKCLRTLKVVGNGDTNEVCLQISNVLIIETEDLKTNVHFENSEGCFRESPESNGSQRVHEVDNDGNKVSIMSERHLLADDNSQNNGASVGRPNGSGASDSLHKSNKPPERRRGKAEKTISLDVLQQYFSGSLKNAAKSLGVCPTTMKRICRQHGISRWPSRKINKVNRSLSKLKQVIESVQGSDAAFNLTSITGPLPIPVGPSSDSQNLEKASPNKVAELSNLAVEGDRDSSLQKPIENDNLAILMSQQGFIDANNNLQLEADKASHSRSSSGEGSINSRTSEASCHGSPANQTFVCKPIASTFAEPQLIPEAFTKEPFQEPALPLSRMLIEDSGSSKDLKNLFTSAVDQPFLARSSNLALMQNSGTVTIKASFKEDIVRFRFPCSGSVTALKDEVAKRLRMDVGMFDIKYLDDDHEWVKLACNADLEECMEISGSHVIRLLVSDVAAHLGSSCGSSG

SEQ ID NO: 468 - protein, 669 aa, Oryza sativa
MERVVGDFNLLLQRGGAAGERGSEGGGGGSPGTEEAAAVAVKQRIARALRLYKEAAGDGGGGWMVQVWAPARDGARRVLATRGQPFVLASQCHRLFQYRTVSLTRVFPVGGAAAADEQGLPARAFDATAPEWTPNVQCYGSGEYARISYALIYDIQGSLALPILDPDDASSPLAVLELVTTAPLLRVSGEVANLCNALRAVSLRGAGICNRAAECYSLAVNQIVHRDATRAAMAEVSELLITVCEAHKLPLAQTWVRCWSCGGGGEDTEKAALTTAGAPFHLAAGADARGFRDACVEHHLQRGQGLVGTAARAPGGGRLCADVARCSKDDYPLAHYAGMYGLAGCLVLRAELSAAAMADAAAATAGDEEDCVVLELFLPPDCTGVAEQKAAVDAVSATIKQCSGNLKAIVISNLDDLFLDTMADGDHQLRHEMDDLGDDQRCSDEEDLQLLENTNIGELNIHNADQIRNEDPTSQVGKNKTKRGKAEKSVTLEELQKHFSGSLKDAARSLGAGYSVDYLHQNPDVYAQINTQPLKVGSPGSMASQGGHFARSARCGNGDGVVTIKASHRGDIIRFRVPCSAGVAAVKAVVAKRLSLDAGAFDVKYLDDDHEWVLLSCDADFQECLDVVPALPSMSVTARSGSGAAAPVVVRLMVQEVADNIGSSCASSD

SEQ ID NO: 469 - protein, 1008 aa, Parasponia andersonii
MSESEEETTPSFPPKSTSSKEVVPDVREVLMDFDLDLDNPWPIMDQIAFVSNSMSPLLFSSPTDQPCSPLWAFADAENNDDNNNNNSNNSDKLGRLVSSAIADSSCFSCNSNSVAERPVGNEERKIAPSPFLGLVPVDNPNGYYLIKERMTQALRYLKDSTDQHVLTQIWAPVKNGCRYVLTTSGQPFVLDPDSNGLHQYRMASLLYMFSVDGETNEVLGLPGRVFRQKLPEWTPNVQYYSIREYPRLDYAQHYNVRGSLALPVFEPSGQSCVGVLELIMTSEKINYAPEVDKVCKALAGSKLEKCRYIRSYNHEICNEGRKNALTEILEILTAACETHKLPMAQTWVPCMHRNVLAYGGGLKKSCTSIDGSCMGQVCMSATELAFYIIDAHMWGFREACLEHHLQKGQGVAGRAFYSRNLCFCGDITQFCKTEYPLVHYARMFGLTSCFAVCLQSSHTGNDNYVLEFFLPPSIANASEQSALLGSLLATMKKHFQSLKVASGIGLEEEGIVELVKVSAIGGLESSLECIQITKSAESPPGPIALPNGGDMVQQDLLKQQLTVDLDTANVGEDAAHDGGSVNHVSVSENKETKKISERKRGKTEKSISLEVLQQYFAGSLKDAAKSLGVCPTTMKRICRQHGISRWPSRKINKVNRSLSKLKRVIESVQGAEGAFGLTPLATSPLPVAVASISRPSTSNGTNHQHSPSNIPSEPPMERKDSPTTSSPRRGQVETEDQLQGGGILSQKEFIHENGGFFSPEINRGSNHSKSGSGSREASVGTPTSHGSCQGSPANGSIIVKDQFVYSIHEQCIKVEGSPESAPQPTDELHFSVPDALVTAECQEPFGGMLIEDAGSSKDLRNLCPAVDAVLDEPVPEYCWINSACSDLAPKQTSGIITQTQPNVIVRLRQEMKSVTIKATYREDIIRFRISLSCSVVELKDEVAKRLKLELGTFDIKYMDDDQEWVLIACDADLQECMDVCRSSGSIMIRLLIHDIMPNLGSSCESTEE

SEQ ID NO: 470 - protein, 1009 aa, Parasponia rigida
MSESEEETTPSFPPKSTSSEEVVPDVREVLMDFDLDLDNPWPIMDQIAFVSNSMSPLLFSSPTDQPCSPLWAFADAENNDDNNNNNSNNSDKLGRLVSSAIADSSCFSCNSNSVAERPVGNEERKIAPSPFLGLVPVDNPNGYYLIKERMTQALRYLKDSTDQHVLTQIWAPVKNGCRYVLTTSGQPFVLDPDSNGLHQYRMASLLYMFSVDGETNEVLGLPGRVFRQKLPEWTPNVQYYSIREYPRLDYAQHYNVRGSLALPVFEPSGQSCVGVLELIMTSEKINYAPEVDKVCKALAGSKLEKCRYIRSYKHEICNEGRKNALTEILEILTAACETHKLPMAQTWVPCMHRNVLAYGGGLKKSCTSIDGSCMGQVCMSATELAFYIIDAHMWGFREACLEHHLQKGQGVAGRAFYSRNLCFCGDITQFCKTEYPLVHYARMFGLTSCFAVCLQSSHTGNDNYVLEFFLPPSIANASEQSVLLGSLLATMKKHFQSLKVASGIGLEEEGIVELVKVSAIGGLESSLECIQIPKSAESPPGPIALPNGGDMVQQDLLKQQLTVDLDTANVGEDAAHDGGSVNHVSVSENKETKKISERKRGKTEKSISLEVLQQYFAGSLKDAAKSLGVCPTTMKRICRQHGISRWPSRKINKVNRSLSKLKRVIESVQGAEGAFGLTPLATSPLPVAVASISRPSTSNGTNHQHSPSNIPSEPPMERKDSPTTSSPRREGQVETEDQLQGGGILSQKEFIHENGGFFSPEINRGSNHSKSGSGSREASVGTPTSHGSCQGSPANGSIIVKDPFVYSIHEQCIKVEGSPESAPQPTDELHFSVPDALVTAECQEPFGGMLIEDAGSSKDLRNLCPAVDAVLDEPVPEYCWINSACSDLAPKQTSGIITQTQPNVIVRLRQEMKSVTIKATYREDIIRFRISLSCSVVELKDEVSKRLKLELGTFDIKYMDDDQEWVLIACDADLQECMDVCRSSGSIIIRLLIHDIMPNLGSSCESTEE

SEQ ID NO: 471 - protein, 1008 aa, Parasponia rugosa
MSESEEETTPSFPPKSTSSKEVVPDVREVLMDFDLDLDNPWPMMDQIAFVSNSMSPLLFSSPTDQPCSPLWAFADAENNDDNNNNNSNNSDKLGRLVSSAIADSSCFSCNSNSVAERPVGNEERKIAPSPFLGLVPVDNPNGYYLIKERMTQALRYLKDSTDQHVLTQIWAPVKNGCRYVLTTSGQPFVLDPDSNGLHQYRMASLLYMFSVDGETNEVLGLPGRVFRQKLPEWTPNVQYYSIREYPRLDYAQHYNVRGSLALPVFEPSGQSCVGVLELIMTSEKINYAPEVDKVCKALAGSKLEKCRYIRSYKHEICNEGRKNALTEILEILTAACETHKLPMAQTWVPCMHRNVLAYGGGLKKSCTSIDGSCMGQVCMSATELAFYIIDAHMWGFREACLEHHLQKGQGVAGRAFYSRNLCFCGDITQFCKTEYPLVHYARMFGLTSCFAVCLQSSHTGNDNYVLEFFLPPSIANASEQSALLGSLLATMKKHFQSLKVASGIGLEEEGIVELVKVSAIGGLESSLECIQIPKSAESPPGPIALPNGGDMVQQDLLKQQLTVDLDTANVGEDAAHDGGSVNRVSVSENKETKKISERKRGKTEKSISLEVLQQYFAGSLKDAAKSLGVCPTTMKRICRQHGISRWPSRKINKVNRSLSKLKRVIESVQGAEGAFGLTPLATSPLPVAVASISRPSTSNGTNHQHSPSNIPSEPPMERKDSPTTSSPRRGQVETEDQLQGGGILSQKEFIHENGGFFSPEINRGSNHSKSGSGSREASVGTPNSHGSCQGSPANGSIIVKDPFVYSIHEQCIKVEGSPESAPQPTDELHFSVPDALVTAECQEPFGGMLIEDAGSSKDLRNLCPAVDAVLDEPVPEYCWINSACLDLAPKQTSGIITQTQPNVIVRLRQEMKSVTIKATYREDIIRFRISLSCSVVELKDEVAKRLKLELGTFDIKYMDDDQEWVLIACDADLQECMDVCRSSGSIMIRLLIHDIMPNLGSSCESTEE

SEQ ID NO: 472 - protein, 991 aa, Phaseolus vulgaris
MSESEEENTDYVTRSKPAEEAGCTMDFDLDLETSWPLDHMAFVSNPMSPFLFSSSTSDQPYSPLWAFSDGEDLKLPASAFSDCHKIFPCDSNSIAEKPEENDDNKKPLPPLAPMPPVENVGGYCVIKERMTQALRYFKELTELNVLAQVWAPVRNGNRYVLTTSGQPFVLDPHSNGLHQYRTVSLMYMFDVDGENDGSLGLPGRVFQQKLPEWTPNVLYYSSKEYPRRDHAQHYNVRGSLALPVFEPALQSCVGVLELIMTSQKINYAPEVDKICKALETVNLRSSEILDHPYTQICNEGRQNALSEILEILTVVCETHNLPLAQTWIPCKHRIVLAQGGGVKKSCSSFDGSCMGKVCMSTTDIAFYIIDAHLWGFREACLEHHLQQSQGVAGRAFLSQSMCFCSNITQFCKTDYPLVHYALMFGLTSCFAICLRSSHTGTDDYVLEFFLPPRVTDFHEQKALLASILATMKQHFQSLKVASGVELEDGSIEIIEATIERIHTRHESIPIAPSFRSPPRPDTSPNMEEEVPRDPSEQQHILMYCNGTNHGANLRDKAGGNIDHMTTLETKNSKKPLERKRGKTEKSISLEVLQRYFAGSLKDAAKSLGVCPTTMKRICRQHGISRWPSRKINKVNRSLSKLKRVIESVQGAEGAFGLNSLSTSPLPIAVGSLPEPSTPNKFSQQVSMGIRPSEPQMKVNELNASKELETNRQAGMEDQLIGGRIRNFERVSNDKGGSTQEVGREPKRTRTGSGSSEDSTNPTSHSSWHDSPPNESSPVKDIFITSNHDQCAVLRRSSPGSTLQPATDTPNHPTSYPMPEFVSAELQEPFGGMLLEDAGSSKDLRNLCPSVAEAILEDLVPEACGTNPPALDLSPKQSMGTPNKVVTPFAATKEMKTVTIKATYREDIIRFRVSLACGIVELKEEVAKRLKLEVGTFDIKYLDDDHEWVLIACDADLQECMDVSRSSGSNIIRVLVHDITSNLGSSCESSGE

SEQ ID NO: 473 - protein, 980 aa, Phaseolus vulgaris
MSESKEENPDLLPKSKQQEEHGFAMDFDIGFESLWSLDHISLVSNPMSPFLLSTISEQPFSPIWAFDVEDERQIRIATAGNTKAATENPVESYENKKTVSPPFVAVPPSENPDGYCLIKERMTQALRHFKELTEQNVLAQVWAPVRNGNRYALTTSGQPFVLDPHSNGLYQYRTASLMYMFSVDGENDEILGLPGRVFQHRIPEWTPNVQYYSSKEYQRLNHAQHYNVRGTLALPVFEPAGQSCVAVLELIMTSPKINYAPEVDKICKALEAVNLRSSEILEHPYNQICNEDRQYALAEILEILTVVCETHSLPLAQTWVPCEHRSVLAHGGGHKKSCSSFDGCCMGQVCMSITDVAFYVIEAHTWGFHEACVEHHLQQGQGVAGRAFLSHNMCFCGNITQFCKTEYPLVHYALMFGLTSSFAVCLQSSHTGNDEYVLEFFLPPRITDFNEQKRLLGSILATMKPHFQSLKIAAGVELEQNCSIEIIEARKEGVQLRFESIPITQSSKSPPRHASPNMGERLPPAPSEQQIMVDFDDINDGKNLGDTAGGHIDQNTSLEARTKKKPSERKRGKAEKSISLDVLQHYFTGSLKDAAKSLGVCPTTMKRICRQHGISRWPSRKIKKVNRSLSKLKCVIESVHGAEGAFGLNSLSTGSFPSTSNKFNRQTSLTIRPSEPKINENDFDASRASESNRQAGVEDHFLSTRTQNPEKVINEKVVAIQETGTKGTTRFRTGSGSSEESANPSPRGSCQGSPPNEMSPPKDIFVTGISEQCHVLRGSLGSTLYSTSTPNRATAYPMPNNFVEITEPQEPFGGQLLEGVGSSKDLRNLCPSADAVLEDQVHEHWRMNHQCSELTPVQHMDTLNNNNNNMTPFAVRKEVKSVTIKATYREDIIRFKISLNCAIVELKEEIDKRLKLEEGTFDIKYLDDDHEWVLIACDADLQECMDISRSSGSNMIRLVVHDILPILGSSCESSGDWKGC

SEQ ID NO: 474 - protein, 990 aa, Prunus avium
MVEPEDESQTPAIPPKSKNIVDDREAALMDFDLDLDAFWPLDPIHFPSNPTSPPLFSSTDQPCSPLWGFPDGDADNDDKLAGQVDQALSDRPQFSSCIPDPGREIPRENEDRRMLTSPSLGLDPVENPEAYCLIKEKITQALRQLKELTDQHVLAQVWAPVKNGGRYALTTSGQPFVLDPHTNGLHQYRMASLMYMFSVDGESDGMLGLPGRVFQQKLPEWTPNVQYYSIKEYPRLGHAQHYNVQGTLALPVFEPSGRSCVGVLELIMTSPKISYASEVDKVCKALEAVSLKSSEILDHTSMQIQICNEGRQTALTEILEILTVVCETHKLPLAQTWVPCMHRNVLAYGGGLKKSCTSFDGSCMEQVCMSTTDAAFYIVDAPMWHFREACVEHHLQKGQGVAGRAFLSHNACFCRDITQFCKTDYPLVHYARMFKLTSCFAICLQSTHTGNDDYILEFFLPPSITDSYEQQTLLGSLLAIIKNHFQSLKVASGIILEEEGLVEMVQASTNKELESRLECIRIPRSAETPPGPTLPNGEEMVQLDSSKPQLMVDFDPANDGSNAVNEGGENNISCPENKDIRKKSEKKRGKAEKSISLEVLQQYFAGSLKDAAKSLGVCPTTMKRICRHHGISRWPSRKIKKVNHSLSKLQRVIESVQGAEGAFGLTSLTASPRSGAVGSISRPYILNGSNQQSSPRSKPSELHGEKKDSPTPTTPGTEGQAWIENQLLDGGILQEELLLEHGRFLLDDGKGSNTSKTGSSSREASAGTPTSHGSCQGSPANGNALVNNTFVSSIHGQCIEVNGFPESAVRPPKELNLSVACSIPDAVLMTDPEEPCRGMLIEDAGSSKDLKNLCPQADAMVDEQVPEACCTNPPCSDSALKPSNTMPHIIARQEMKSVTIKATYKEDIIRFRISMSSGIVELKDEVAKRLKLEMGTFDIKYMDDDLEWVLIACDVDLQEFMEICRSLGRNMIRLSVHDIMSNFGSSCGSM

SEQ ID NO: 475 - protein, 474 aa, Prunus mume
MVEPEEESQTQAIPPESKNIVDDREAALMEFDLDLDAFSDRPQFSSCIPDLGREIPRENEDRRMLTSPFSGLEPVENPDAYCLIKEKITQALRQLKELTDQHVLAQFWAPVKNGGRYVLTTSGQPFVLDPHANGLYQYRMASLMYMFSVDGESDGMLGLPGRVFQQKLPEWTPNVQYYSIKEYPRLGHAQHYNVQGTLALPVFEPSGRTCVGVLELIMTSPKISYASEVDKVCKALEAVSLKSSEILDHRSMQIQICNEGRQTALTEILEILTVVCETHKLPLAQTWVPCMHRNVLAYGGGLKKSCTSFDGSCMEQVCMSTTDAAFYIVDAPMWHFREACVEHHLQKGQGVAGRAFLSRNACFCRDITQFCKTDYPLVHYARMFKLTSCFAICLQSTRTGNDDYILEFFLPPSITDSYEQLTLLGSLLAIIKNHFQSLKVASGIILEEEGLVEMVQASTNKGLDSRLECIRIPR

SEQ ID NO: 476 - protein, 991 aa, Prunus mume
MVELEEESQTQAIPPKSKNIVDDREAALMEFDLDLDAFWPLDPIHFPSNPTSPPLFSSTDQPCSPLWVFPDGDADNDDKLSGQVDQALSDRPQFSSCIPDPGREIPRENEDRRMLTSPFLGLEPFENPDAYCLIKEKITQALRQLKELTDQHVLAQVWAPVKNGGRYVLTTSGQPFVLDPHTNGLHQYRMASLMYMFSVDGESDGMLGLPGRVFQQKLPEWTPNVQYYSIKEYPRLGHAQHYNVQGTLALPVFEPSGQTCVGVLELIMTSPKINYASEVDKVCKALEAVSLKSSEIKDHTSMQIQICNEGRQTALTEILEILTVVCETHKLPLAQTWVPCMHRNVLAYGGGLKKSCTSFDGSCMEQVCMSTTDAAFYIVDAPMWHFRDACVEHHLQKGQGVAGRAFLSRNACFCRDITQFCKTDYPLVHYARMFKLTSCFAICLQSTRTGNDDYILEFFLPPSITDSYEQQTLLGSLLAIIKNHFQSLKVASGIILEEEGLVEMVQASTNKGLDSRLECIRIPCSAETPPGPAIPNGEEMVQLDSSRPQLMVDFDPANDGNNAVNEGGENNISCLENKDIKKKSEKKRGKAEKSISLEVLQQYFAGSLKDAAKSLGVCPTTMKRICRHHGISRWPSRKIKKVNHSLSKLQRVIESVQGAEGAFGLTSLTASPRSGAVGSISRPYILNGSNQQSSPSSKPSELHGEKKDSPTPTTPGKEGQAWIENQLLDGGILSQKELLLEHGRFLLDDGKGSNTSKTGSSSREASAGTPTSHGSCQGSPANGNALVNNPFVPSIHDQCIEVNGFPESAVRPPKEPNLSVACSIPDAVLMTDPEEPCRGMLIEDAGSSKDLKNLCPQVDAMVDEQVPEACRTNPPCSDSALKPSNTMPHIIARQEMKSVTIKATYKEDIIRFRISMSSGIVELKDEVAKRLKLEMGTFDIKYVDDDLEWVLVACDADLQECMEICRSLGIKMIRLSVHDIMSNFGSSCGSM

SEQ ID NO: 477 - protein, 480 aa, Prunus mume
MVEPEEESQTQAIPPESKNIVDDREAALMEFDLDLDAFSDRPQFSSCIPDLGREIPRENEDRRMLTSPFSGLEPVENPDAYCLIKEKITQALRQLKELTDQHVLAQFWAPVKNGGRYVLTTSGQPFVLDPHANGLYQYRMASLMYMFSVDGESDGMLGLPGRVFQQKLPEWTPNVQYYSIKEYPRLGHAQHYNVQGTLALPVFEPSGRTCVGVLELIMTSPKISYASEVDKVCKALEAVSLKSSEILDHRSMQVSCNNNIQICNEGRQTALTEILEILTVVCETHKLPLAQTWVPCMHRNVLAYGGGLKKSCTSFDGSCMEQVCMSTTDAAFYIVDAPMWHFREACVEHHLQKGQGVAGRAFLSRNACFCRDITQFCKTDYPLVHYARMFKLTSCFAICLQSTRTGNDDYILEFFLPPSITDSYEQLTLLGSLLAIIKNHFQSLKVASGIILEEEGLVEMVQASTNKGLDSRLECIRIPR

SEQ ID NO: 478 - protein, 457 aa, Prunus mume
MVEPEEESQTQAIPPESKNIVDDREAALMEFDLDLDAFSDRPQFSSCIPDLGREIPRENEDRRMLTSPFSGLEPVENPDAYCLIKEKITQALRQLKELTDQHVLAQFWAPVKNGGRMASLMYMFSVDGESDGMLGLPGRVFQQKLPEWTPNVQYYSIKEYPRLGHAQHYNVQGTLALPVFEPSGRTCVGVLELIMTSPKISYASEVDKVCKALEAVSLKSSEILDHRSMQVSCNNNIQICNEGRQTALTEILEILTVVCETHKLPLAQTWVPCMHRNVLAYGGGLKKSCTSFDGSCMEQVCMSTTDAAFYIVDAPMWHFREACVEHHLQKGQGVAGRAFLSRNACFCRDITQFCKTDYPLVHYARMFKLTSCFAICLQSTRTGNDDYILEFFLPPSITDSYEQLTLLGSLLAIIKNHFQSLKVASGIILEEEGLVEMVQASTNKGLDSRLECIRIPR

SEQ ID NO: 479 - protein, 683 aa, Prunus persica
MVEPEEESQTQAIPPKSKNIVDDREAALMEFDLDLDAFWPLDPIHFPSNPTSPPLFSSTDQPCSPLWGFPDGDADNDDKLAGQVDQALSDRPQFSSCIPDPEREIPRENEDRRILTSPFLGLEPVENPNAYCLIKEKITQALRQLKELTDQHVLAQVWAPVKNGGRYVLTTSGQPFVLDPHTNGLHQYRMASLMYMFSVDGESDGMLGLPGRVFQQKLPEWTPNVQYYSIKEYPRLGHAQHYNVQGTLALPVFEPSGRSCVGVLELIMTSPKINYASEVDKVCKALEAVSLKSSEILDHTSMQVSSNNICPTTMKRICRHHGISRWPSRKIKKVNHSLSKLQRVIESVQGAEGAFGLTSLTASPRSGAVGSISRPYILNGSNQQSSPSSKPSELLGEKKDSPTPTTPGKEGQAWIDNQLLDGGILSQEELLLEHGRFLLDDGKGSNTSKTGSSSREASAGTPTSHGSCQGSPANGNALVNNPFVPSIHDQCIKVNGFPESAVRPPKEPNLLVACSIPDAVLMTDPEEPCRGMLIEDAGSSKDLKNLCPQVDAMVDEQVPEAACTNPPCSDSALNPSNTMPQIIARQEMKSVTIKATYKEDIIRFRISMSSGIVELKDEVAKRLKLEMGTFDIKYMDDDLEWVLVACDADLQECMEICRSLGRKMIRLSVHDIMPNFGSSCGSM

SEQ ID NO: 480 - protein, 991 aa, Prunus persica
MVEPEEESQTQAIPPKSKNIVDDREAALMEFDLDLDAFWPLDPIHFPSNPTSPPLFSSTDQPCSPLWGFPDGDADNDDKLAGQVDQALSDRPQFSSCIPDPEREIPRENEDRRILTSPFLGLEPVENPNAYCLIKEKITQALRQLKELTDQHVLAQVWAPVKNGGRYVLTTSGQPFVLDPHTNGLHQYRMASLMYMFSVDGESDGMLGLPGRVFQQKLPEWTPNVQYYSIKEYPRLGHAQHYNVQGTLALPVFEPSGRSCVGVLELIMTSPKINYASEVDKVCKALEAVSLKSSEILDHTSMQIQICNEGRQTALTEILEILTVVCETHKLPLAQTWVPCMHRNVLAYGGGLKKSCTSFDGSCMARVCMSTTDAAFYIVDAPMWHFRDACVEHHLQKGQGVAGRAFLSRNACFCRDITQFCKTDYPLVHYARMFKLTSCFAICLQSTHTGNDDYILEFFLPPSITDSYEQQTLLGSLLAIIKNHFQSLKVASGIILEEEGLVEMVQASTNKGLDSRLECIRISRSSETPPGPALPNGEEMVQLDSSKPQLMVDFDPANDGSNAVNEGGENNISCPENKDIKKKSEKKRGKAEKSISLEVLQQYFAGSLKDAAKSLGVCPTTMKRICRHHGISRWPSRKIKKVNHSLSKLQRVIESVQGAEGAFGLTSLTASPRSGAVGSISRPYILNGSNQQSSPSSKPSELLGEKKDSPTPTTPGKEGQAWIDNQLLDGGILSQEELLLEHGRFLLDDGKGSNTSKTGSSSREASAGTPTSHGSCQGSPANGNALVNNPFVPSIHDQCIKVNGFPESAVRPPKEPNLLVACSIPDAVLMTDPEEPCRGMLIEDAGSSKDLKNLCPQVDAMVDEQVPEAACTNPPCSDSALNPSNTMPQIIARQEMKSVTIKATYKEDIIRFRISMSSGIVELKDEVAKRLKLEMGTFDIKYMDDDLEWVLVACDADLQECMEICRSLGRKMIRLSVHDIMPNFGSSCGSM

SEQ ID NO: 481 - protein, 895 aa, Prunus yedoensis
  REGION 1..895: note = var. nudiflora
MVEPEDEGQTPAIPPKSKNIVDDREAALMDFDLDLDAFWPLDPIHFPSNPTSPALFSSTDQPCSPLWGFPDGDADNDDKLAGQVDQALSDRPQFSSSQVWAPVKNGGRYVLTTSGQPFVLDPHTNGLHQYRMASLMYMFSVDGESDGMLGLPGRVFQQKLPEWTPNVQYYSIKEYPRLGHAQHYNVQGTLALPVFEPSGRSCVGVLELIMTSPKINYASEVDKVCKALEAVSLKSSEILDHTSMQIQICNEGRQTALTEILEILTVVCETHKLPLAQTWVPCMHRNVLAYGGGLKKSCTSFDGSCMEQVCMSTTDAAFYIVDAPMWHFREACVEHHLQKGQGVAGRAFLSRNACFCRDITQFCKTDYPLVHYARMFKLTSCFAICLQSTHTGNDDYILEFFLPPSITDSYEQHTLLGSILAIIKNHFQSLKVASGIILEDEGLVDMLDSSKPQLMVDFDPANDGSNAVNEGGENNISCPKNKDIKKKSEKKRGKAEKSISLAVLQQYFAGSLKDAAKSLGVCPTTMKRICRHHGISRWPSRKIKKVNHSLSKLQRVIESVQGAEGAFGLTSLTASPRSGAVGSISQPYILNGSNQQSSPSSKPSELHGEKKDSPTPTTAGKEGQAWIENQLLDGGILSQEELLLEHSRFLLDDGKGSNTSKTGSSSREASAGTPTSHGSCQGSPANGNALVNNTFVSSIRGQCIEVNGFPESAVRPPKEPNLSVACSIPDAVLMTDPEEPCRGMLIEDAGSSKDLKNLCPQVDAMMDEQVPEACCTNPPCSDSALKPSNTMPHIIARQEMKSVTIKASYKEDIIRFRISMSSGIVELKDEVAKRLKLEMGTFDIKYMDDDLEWVLIACDADLQECMEICRSLGRNMIRLSVHDIMSNFGSSCGSM

SEQ ID NO: 482 - protein, 988 aa, Pyrus x bretschneideri
MSDPEDKTQAPAIPPKPKNEREAALMDFDLDLDALWPLDPNHFLSNPTSPLLLPSNDQPCTPLWAFPDGDVDGDDKLTGRVGQDLSDPSQFVSCNSNSATQGSTENKDNRLLPSLFSGLEPVESSDGYSLFKEKITQALRYLKELTDQHVLAQVWVPVKDGNRYVLTTSGQPFVLDQHNIGLHQYRMASLMYMFSVGGESDGMLGLPGRVFQHKLPEWTPNVQYYSIKEYPRLGHAQHYNVQGTLALPVFEPSGRSCAGVLELIMTSPIINCGPEVDKVCKALEAVSLKSSEILDHPSRQIQICNEGRQTALAEILKILTVVCETYKLPLAQTWVPCMHRSVLAYGGGLKKSCTSFDGSCMEQVSMSTTDVAFYIIDAHMWRFRDACVEHHLQKGQGVAGRAFSSRNACFCGDITQFCKTEYPLVHYARMFGLASSFAICLQSTHTGNDDYILEFFLPPSITDSHEQQTLLGSILAIMKNDFRSLSVASGIVLEEEGIVEIVQVSTNNGLATRLECILIPHSVESPPGPALPNREEMVQLDSSKQQLKEVYDVVNDGRNPVHEGGENNISLPENKDIKKRPEKKRGKAEKSISLQVLQQYFAGSLKDAAKSLGVCPTTMKRICRHHGISRWPSRKIKKVNRSLTKLQRVIDSVQGAEGAFGLTPLTASPRPVAAGSISQPCNLNGSNKQGSPSSKPCEVSGEKKDSTTSTSPGTEGQAGIDNHLLDGWILSHEELAPEHNTFLRDRGKGSNTSNTGSSSREASAGTPTSHGSCQGSPGNGIAVVNDPFVPFIHEQCIEVNGSPQSAVRTTEESNLLVACSIPDALLMAEPEEPCRGMLLGDAGSSKDLRNLCPLADTIMDEQVREACNTNPPFLDSAPKQSNTMPDIMGRQEMKSVIIKATYKEDIIRFRVSMSSGIVELKEAVAKRLKLEVGTFDIKYVDDDLERVLVACDADLQECMEVCRTSGSNMIRLSVHDIMSHLGSSCWNA

SEQ ID NO: 483 - protein, 993 aa, Quercus suber
MAEPEEEKNSAFSATQKSTDHQNREPFMDFEDLDIGSWPLDQISFFNDINDNTNDQLQPMSPFLISNSYHNYSSLWALADENEDLAQPSSAPLELSCTPYLETEKPMEKDDIMMFPSPLVGQLPLDNPDGYFVSKERMMQALRHFKDMTEQNVLAQIWAPVKDGSRYVLTTSGQPFLIGTLGNGLHQFRAASVRYKFAVSEDGALGLPGRVFRQKFPEWTPNVQYYSCKEYPRRVHAQCFNVQGSLALPVFEPSGQSCVGVVELIMNSSKINYAPEVDKVCKALEAVNLRSSEILDHPNTQIYNEGRQNALAEILEILAVVCEAHKLPLAQTWVPCENHSVLAHGGALKKSCASLNGSCMGQVCMSTTDVAVYVVDPHMCGFREACIEHHLQKGQGVAGRAFLSHNSCFCENITQFCKTEYPLVHYARMFGLTSCFAICLRSTHTGDDDYILEFFLPPSTTDLYEQQILLGSLLEMMKQHFQSLKIASGIELEGEVSVEIIQVSTDGIVDSRLESVRITQSMKSPPGPDSLHIVEDMVQLDSSKQQLRVHLNDMNNKGIVASNAGGRLDQFSSLENEDMKKISERRRRKSEKSISLEVLQQYFSGSLKEAAKSLGVCPTTMKRICRQHGISRWPSRKINKVNRSLSKLQRVIDSVQCAEGTFGLGSLTTSQIPVSVGSHPSSLNRSNKQTSPSFKVSEPQEKNGSSTFKMLDEQAAIGDQLLRGRMLSPQKVIHDQSRSPPEHGKSSNSSKTRSRSCEESAGTPNSQDSCQGSPPNESTLVGHPYVSAINEQCVNVEGSPESPYQLTAAPNISPTNSIPDAFLMTEPQELFGGILIEDSGSSKDLRNLCPSVADAMVDEQVPEFCSTNPPCPSLASNQPIPSLVHKISHVTARNEMKSVIIKATYGDDIIRFRISLNSGMLELKEEAAKRLKLEVGTFEIKYLDDDHEWILIACDADLQECMDISRSAGSNMIRLLVQDVMPNLGSSWESSGD

SEQ ID NO: 484 - protein, 898 aa, Quercus suber
MGTPYLETEKPMEKDDIMMFPSPLVGQLPLDNPDGYFVSKERMMQALRHFKDMTEQNVLAQIWAPVKDGSRYVLTTSGQPFLIGTLGNGLHQFRAASVRYKFAVSEDGALGLPGRVFRQKFPEWTPNVQYYSCKEYPRRVHAQCFNVQGSLALPVFEPSGQSCVGVVELIMNSSKINYAPEVDKVCKALEAVNLRSSEILDHPNTQIYNEGRQNALAEILEILAVVCEAHKLPLAQTWVPCENHSVLAHGGALKKSCASLNGSCMGQVCMSTTDVAVYVVDPHMCGFREACIEHHLQKGQGVAGRAFLSHNSCFCENITQFCKTEYPLVHYARMFGLTSCFAICLRSTHTGDDDYILEFFLPPSTTDLYEQQILLGSLLEMMKQHFQSLKIASGIELEGEVSVEIIQVSTDGIVDSRLESVRITQSMKSPPGPDSLHIVEDMVQLDSSKQQLRVHLNDMNNKGIVASNAGGRLDQFSSLENEDMKKISERRRRKSEKSISLEVLQQYFSGSLKEAAKSLGVCPTTMKRICRQHGISRWPSRKINKVNRSLSKLQRVIDSVQCAEGTFGLGSLTTSQIPVSVGSHPSSLNRSNKQTSPSFKVSEPQEKNGSSTFKMLDEQAAIGDQLLRGRMLSPQKVIHDQSRSPPEHGKSSNSSKTRSRSCEESAGTPNSQDSCQGSPPNESTLVGHPYVSAINEQCVNVEGSPESPYQLTAAPNISPTNSIPDAFLMTEPQELFGGILIEDSGSSKDLRNLCPSVADAMVDEQVPEFCSTNPPCPSLASNQPIPSLVHKISHVTARNEMKSVIIKATYGDDIIRFRISLNSGMLELKEEAAKRLKLEVGTFEIKYLDDDHEWILIACDADLQECMDISRSAGSNMIRLLVQDVMPNLGSSWESSGD

SEQ ID NO: 485 - protein, 1008 aa, Solanum lycopersicum
MSEPGGGMTQNHLPKSKELTPATVTERESMMMDLDFDIDASWSFDQIFAAAAAVSSNPASPFLPCSPLWAFPDDNDEKPAGNGLSGALRISGHPRFVAYTGDLEATTETISVNTDKGRLTSPISGLLPGDNPEGSCIIKERMTQALRYLKETSGERVLAQVWAPVKEAGRSVLTTSGQPFVLDPECNGLHQYRTVSLMYMFAADGETDGVLGLPGRVFRLKLPEWTPNVQYYSSKEFPRLDHALNYNVRGTLALPVFEPSGRSCVGVLELIMTSQKINYAAEVDKVCKALEAVNLKSSDILDHPNTQVYVMGYMNQICNEGRQNALVDILEILTAVCETYKLPLAQTWVPCRHRSVLADGGGLRKSCSSFDGSCMGQICMSTTDVAFYVVDAHMWGFRDACAEHHLQRGQGVAGRAYASRKSCYCEDITQFCKTEYPLVHYARMFGLTSCFAICLRSSHTANDDYILEFFLPPNSGDYSDQPALLNSLLLTMKQHFRSLSIASGEELEHDWGSVEIIQASMEEKIDAKPESVPTAKTSPQLTSLPNGWVHLDPVGEQQSAVGSNVSKGARSTSGTGEAPNNVSNSDNKTSGKKSERKRGKAEKTISLEVLQQYFAGSLKDAAKSLGVCPTTMKRICRQHGISRWPSRKINKVNRSLSKLKCVIESVQGAEGAFTLTSLAPNSLPAAVSSISWPAGANVSNLPSSPSSKPSVFPEEKNEFFHHGTPESHIEAEPSNQMLGGRVARKEEFTPMQNGFLHAEGTHKSRTGSVSREESAGTPTSHGSCQGSPCAGNGFSPQNELVNSPAHESCMKVGGSLEAARQTTAEINLSSAFLMPQPIIPKHTQEPFGGMLVEDAGSSHDLRNLCSPRDALVDERVPDYNLTNPPFSDAIAKDPVYVPPDTIQQYSAWPEVTSVTIKATYKEDIIRFRLCLSSGIVKLKEEVAKRLKLELGTFYIKYLDDDLEFVPISCDADLQECVDISRSSGSSIVRLLIHDIMSNLGSSCESSGK

SEQ ID NO: 486 - protein, 978 aa, Solanum lycopersicum
MSEPEEEMNFIFRSKPKDFVHPPPATAAAIFAAAASASNPMSPFLVSAASEQPCSPLWAFSDENEDKPNGNALSTGSLRLSNYPRFVTYANEHEAAPETVSVTDDKKRIPPPIKGLAPLDYLDSSCIIKERMTQALRYFKESTGERVLAQVWAPVKNGGRYVLTTSGQPFVLDPDCNGLHQYRMVSLMYMFSVDGETDGVLGLPGRVYRKKLPEWTPNVQYYSSKEFPRLNHALDYNVRGTLALPVFEPSGQSCVGVLELIMTSQKINYAPEVDKVCKALEAVNLKSSEILDYPNHQICNEGRQNALVEILEILTAVCETYKLPLAQTWVPCRHRSVLADGGGFKKSCSSFDGSCMGQVCMSTTDVAFYVVDAHMWGFREACAEHHLQKGQGVAGRAYASQKSCFCEDIGKFCKTEYPLVHYARLFGLSRCFAICLRSTHTGNDDYILEFFLPPNDGDYTDQLALLNSLLLTMKQHFRSLRVASGEELEHDWGSVEIIKASTEEKLGSRFDSVPTTKSLPQSASVANGRRHPDLMEEQHSTVAKGAEGVNVTAEAHNHASVPQNKQTGKKSERKRGKAEKTISLEVLQQYFAGSLKDAAKSLGVCPTTMKRICRQHGISRWPSRKINKVNRSLSKLKRVIESVQGADGTFSLTSLAPNSLPVAVGSISWPAGINGSPCKASEYQEEKNEFSNHGTPGSHEEAEPTDQMLGSRIIGNEELSPKLNGFVREGSHRSRTGSFSREESTGTPTSHGSCQGSPSPANESSPQNELLNSPTQESVMKVEGSLEPARQTTGELNLSTAFLMPGLFIPEHTHQQFRGMLVEDAGSSHDLRNLCPAGETMFDERVPEYSWTNPPCSNGIATNQVPLPVEKMPQFSSRPEVTSVTIKATYREDIIRFRLCLNSGIYKLKEEVSKRLKLEMGTFDIKYLDDDHEWVLIACDADLQECIDISSSSGSNVVRLLVHDIMPNLGSSCESSGV

SEQ ID NO: 487 - protein, 1053 aa, Solanum tuberosum
MESHSSINHYRHLLRHLSLLATYIIERKSPSLSLYIFSSMSEPEEEMNFIFRSKPKEFAPPPPAPATALQQQQHAAGENHRESLMMDLDLDLDASWSFDQIFAAAASASNPMSPFLVPAASEQPCSPLWAFSDENEDKPNGNALSSGSLRLSNYPRFVTYANEHEAAPETVSVTDDKKRIPLPIKGLAPLDYLDSSCIIKERMTQALRYFKESTGERVLAQIWAPVKNGGRYVLTTSGQPFVLDPDCNGLHQYRMVSLMYMFSVDGETDGVLGLPGRVYRKKLPEWTPNVQYYSSKEFPRLNHALDYNVRGTLALPVFEPSGQSCVGVLELIMTSQKINYAPEVDKVCKALEAVNLKSSEILDYPNHQICNEGRQNALVEILEILTAVCETYKLPLAQTWVPCRHRSVLADGGGFKKSCSSFDGSCMGQVCMSTTDVAFYVVDAHMWGFREACAEHHLQKGQGVAGRAYASQKSCFCEDIGQFCKTEYPLVHYARLFGLSSCLAICLRSTHTGNDDYILEFFLPPNDGDYTDQLALLNSLLLTMKQHFRSLRVASGEELEHNWGSVEIIKASTEEKLGSRFDSVPTTKSLPQSASVANGRTHPDLMEEQQSPVALNVAKGAEGVNGTAEAHNHASVPENKQTGKKSERKRGKAEKTISLEVLQQYFAGSLKDAAKSLGVCPTTMKRICRQHGISRWPSRKINKVNRSLSKLKRVIESVQGADGTFSLTSLAPNSLPVAVGSISWPAGINGSPCKASEYQEEKNEFSNHGTPGSHEEAEPMDQMLGSRIIGNEELSPKQNGFVREGSHRSRTGSFSREESTGTPTSHGSCQGSPSPANESSPQNELVNSPTQESVMKVEGSLEPARQTTGEINLSTSFLMPGLYIPEHTQQQFRGMLVEDAGSSHDLRNLCPAGEAMFDERVPEYSWTNPPCSNGIATNQVPLPVEKMPQFSSRPEVTSVTIKATYREDIIRFRLCLNSGIYKLKEEVAKRLKLEMGTFDIKYLDDDHEWVLITCDADLQECIDISRSSGSNVVRLLVHDIMPNLGSSCESSGE

SEQ ID NO: 488 - protein, 1015 aa, Solanum tuberosum
MSEPEGGMTQNHLPKSKELTPLPHTASTAPVTERESMMMDLDFDIDASWSFDQIFAAAAAVSSNPASPFLPCSPLWAFSDDNDEKPAGNGLSGALRISGHPRFVAYTGDIEGTTETVSVNADKGRLPSPISGLIPGDNPDGSCIIKERMTQALRYLKESTGERVLAQVWAPVKEAGRSVLTTSGQPFVLDPECNGLHQYRTVSLMYMFAADGETDGVLGLPGRVFRLKLPEWTPNVQYYSSKEFPRLDHALHYNVRGTLALPVFEPSGRSCVGVLELIMTSQKINYAAEVDKVCKALEAVNLKSSDILDHPNTQVYVMGYMNQICNEGRQNALVDILEILTAVCETYKLPLAQTWVPCRHRSVLADGGGLKKSCSSFDGSCMGQICMSTTDVAFYVVDAHMWGFRDACAEHHLQRGQGVAGRAYASRKSCYCEDITKFCKTEYPLVHYARMFGLTSCFAICLRSSHTANDDYILEFFLPPNSGDYSDQQALLNSLLLTMKQHFRSLSIASGGELEHDWSSVEIIQASMEEKIDAKPESVPTPITSPQLTSLPNGWMHLDPVGEQQSAVGSNVSKGARSTSGTGEAPNHVSNSDNKTSGKKSERKRGKAEKTISLEVLQQYFAGSLKDAAKSLGVCPTTMKRICRQHGISRWPSRKINKVNRSLSKLKCVIESVQGAEGAFTLTSLAPNSLPAAVSSISWPAGANVSNLPSSPSSKPSVFPGEKNEFSHHGTPESHIEAEPSNQMLGGRVARKEEFTPTQNGFLHAEGTRKSRTGSVSREVSAGTPTSHGSCQGSPCAGNEFSPQNELVNSPAHESCMKVGGSLEAARQTTTEINLSSAFLMPQPIIPKHTQEPFGGMLVEDAGSSHDLRNLCLPRDALVDERVPDYNFTIPPVSDATAKDPVYVPPDAIQQYSAWPEVTSVTIKATYKEDIIRFRLCLNSGTVKLKEEVAKRLKLELGTIDIKYLDDDLELVPISCDADLQECVDISRSSGSSIVRLLIHDIMSNLGSSCESSGK

SEQ ID NO: 489 - protein, 996 aa, Solanum tuberosum
MSEPEGGMTQNHLPKSKELTPLPHTASTAPVTERESMMMDLDFDIDASWSFDQIFAAAAAVSSNPASPFLPCSPLWAFSDDNDEKPAGNGLSGALRISGHPRFVAYTGDIEGTTETVSVNADKGRLPSPISGLIPGDNPDGSCIIKERMTQALRYLKESTGERVLAQVWAPVKEAGRSVLTTSGQPFVLDPECNGLHQYRTVSLMYMFAADGETDGVLGLPGRVFRLKLPEWTPNVQYYSSKEFPRLDHALHYNVRGTLALPVFEPSGRSCVGVLELIMTSQKINYAAEVDKVCKALEAVNLKSSDILDHPNTQVYVMGYMNQICNEGRQNALVDILEILTAVCETYKLPLAQTWVPCRHRSVLADGGGLKKSCSSFDGSCMGQICMSTTDVAFYVVDAHMWGFRDACAEHHLQRGQGVAGRAYASRKSCYCEDITKFCKTEYPLVHYARMFGLTSCFAICLRSSHTANDDYILEFFLPPNSGDYSDQQALLNSLLLTMKQHFRSLSIASGGELEHDWSSVEIIQASMEEKIDAKPESVPTPITSPQLTSLPNGWMHLDPVGEQQSAVGSNVSKGARSTSGTERKRGKAEKTISLEVLQQYFAGSLKDAAKSLGVCPTTMKRICRQHGISRWPSRKINKVNRSLSKLKCVIESVQGAEGAFTLTSLAPNSLPAAVSSISWPAGANVSNLPSSPSSKPSVFPGEKNEFSHHGTPESHIEAEPSNQMLGGRVARKEEFTPTQNGFLHAEGTRKSRTGSVSREVSAGTPTSHGSCQGSPCAGNEFSPQNELVNSPAHESCMKVGGSLEAARQTTTEINLSSAFLMPQPIIPKHTQEPFGGMLVEDAGSSHDLRNLCLPRDALVDERVPDYNFTIPPVSDATAKDPVYVPPDAIQQYSAWPEVTSVTIKATYKEDIIRFRLCLNSGTVKLKEEVAKRLKLELGTIDIKYLDDDLELVPISCDADLQECVDISRSSGSSIVRLLIHDIMSNLGSSCESSGK

SEQ ID NO: 490 - protein, 937 aa, Solanum tuberosum
MITMKNLPEMDFPVLYVSPATLDLSLVYTGDIEGTTETVSVNADKGRLPSPISGLIPGDNPDGSCIIKERMTQALRYLKESTGERVLAQVWAPVKEAGRSVLTTSGQPFVLDPECNGLHQYRTVSLMYMFAADGETDGVLGLPGRVFRLKLPEWTPNVQYYSSKEFPRLDHALHYNVRGTLALPVFEPSGRSCVGVLELIMTSQKINYAAEVDKVCKALEAVNLKSSDILDHPNTQVYVMGYMNQICNEGRQNALVDILEILTAVCETYKLPLAQTWVPCRHRSVLADGGGLKKSCSSFDGSCMGQICMSTTDVAFYVVDAHMWGFRDACAEHHLQRGQGVAGRAYASRKSCYCEDITKFCKTEYPLVHYARMFGLTSCFAICLRSSHTANDDYILEFFLPPNSGDYSDQQALLNSLLLTMKQHFRSLSIASGGELEHDWSSVEIIQASMEEKIDAKPESVPTPITSPQLTSLPNGWMHLDPVGEQQSAVGSNVSKGARSTSGTGEAPNHVSNSDNKTSGKKSERKRGKAEKTISLEVLQQYFAGSLKDAAKSLGVCPTTMKRICRQHGISRWPSRKINKVNRSLSKLKCVIESVQGAEGAFTLTSLAPNSLPAAVSSISWPAGANVSNLPSSPSSKPSVFPGEKNEFSHHGTPESHIEAEPSNQMLGGRVARKEEFTPTQNGFLHAEGTRKSRTGSVSREVSAGTPTSHGSCQGSPCAGNEFSPQNELVNSPAHESCMKVGGSLEAARQTTTEINLSSAFLMPQPIIPKHTQEPFGGMLVEDAGSSHDLRNLCLPRDALVDERVPDYNFTIPPVSDATAKDPVYVPPDAIQQYSAWPEVTSVTIKATYKEDIIRFRLCLNSGTVKLKEEVAKRLKLELGTIDIKYLDDDLELVPISCDADLQECVDISRSSGSSIVRLLIHDIMSNLGSSCESSGK

SEQ ID NO: 491 - protein, 933 aa, Sorghum bicolor
MDLDPSPASAHGDGGGCADAWPFDSLTTSMLFSSVSASPQLQPLPANSSWLTPPSPLWLFEDRHMLPLDAPDAAPEAAVAAAVVEEVQRARSGNSDTSSKRVEQINHKWQFHLSLDEDGTDNSSLFKEKLTQALRYFKESTDQHLLVQVWAPVKNGDRYVLTTSGQPFVLDHQSIGLLQYRAVSMMYMFSVDGENVGELGLPGRVYKQKVPEWTPNVQYYSSGEYQRLNHAISYNVHGTVALPVFDPAAQSCIAVVELIMTSKKINYACEVDKVCKALEAVNLKSTEILDHPNVQICNEGRQAALVEILEILTVVCEEHKLPLAQTWVPCKYRSVLAHGGGLKKSCLSFDGSCMGEVCMSTSDVAFHVIDAHMWGFRDACVEHHLQRGQGVSGKAFISHKPCFSKDIQKFCKLTYPLVHYARMFGLAGCFAICLQSSYTGNDDYVLEFFLPPDCIDEDDQNALLESILTLMKRCLRSLKVVGDRYSSGASLQLSNVLKLENEEFKTDAQFDNSDGSLHESPGGDRHGGAHKFDNGNKKVLDLTEGQLLTDDYSQDNGTSAGRPNGSGASDSSLLHKTNKPPERRRGKAEKTISLEVLQQYFSGSLKNAAKSLGVCPTTMKRICRQHGISRWPSRKINKVNRSLSKLKQVIESVQGSDAAFNLTSITGPLPIPVGPSSESLNVERLTQSKVAELSNLAVDGDRDSLQKSLENDDHFGIVMAHQGFIDNNNDSQLEADKASHSRSSSGEGSINSRTSEGSCQGSPANQTFVCKPIASTFAEPQLNQEFNKEPFQEPQLPLSRMLIEDSGSSKDLKNLFTSTSDQPFLAPPNNLVSVKHSGTVTIKASFKEDIVRFRFPCSGGVIVLKEEVAKRLRMDVGTFDIKYLDDDHEWVKLACNADLEECMEISRLSGSHVIRLLVSDIAAHFGSSCGSSG

SEQ ID NO: 492 - protein, 747 aa, Sorghum bicolor
MAMEMETDMDGVLQRFDVDLLLDGHGSSDSPCGSASGGGGTQPQDNKEVVGGGAVKERIARALRIYKDAAAGHDGGGGALVQVWAPARDGDRRVLATRGQPFVLPPPRCHRLFQYRTVSLTHAFPIGGGAVPGERGLPGRVFDAGEPEWTPNVQYYGTGEYARISYALIYDIQAALALPILDPATGSCLAVLELVTTSPRLHFAAEVDRLSKALQAVALRGSEICRHPAPEVCNDDEAAAQVAMSEVAEILSKVGEAHKLPLAQVWGRCRRCSTGTEHASLSLTAAGTPFYLTDTNPTLLGFHEACVEHHLRSGRGGLVDEAAAARRPRFCADVTKYSMDAYPLAHHARFCGLAGCLAVCAQLRRGGDASMDMNGGGDGGWDECVLEFFLPPDCRDGAAQKAAADAVAATIMERFGNGDLKAVVISGLQDLAFDIVADGECVLRPDTVTMADAPELELNYHGGDERDSDEEGLCLAAAMGTTAEIEALKMHHDEHHGGEDPRSQVGKKTTTKRKGEKTVSLEELQRYFSGSLKDAAKSLGVCPTTMKRICRKHGISRWPFRKLAKANRSLDKIKCVFESVQGSSQAMVSPAPAVAAARRAPALPCLSSALRVASSQGSCQAPPPPQKEATWRKPLHGGDAGVVTVKANYRGDIIRFRVPSSAGVATVKGEVAKRLGLEAGEFDVKYLDDDNEWVLLSCDADFQECLDVVPALSGASTSSGSGMAQPVVRLMVQEVAEIHGSSCGSSD

SEQ ID NO: 493 - protein, 1009 aa, Trema levigata
MSESEEETTPSFPPKSSSSKEVVPDVREVLMDFDLDLDNPWPMMDQIAFVSNPMSPLLFSSSTDQPCSPLWAFADAENNDDDNNNNSNNSNKLGRHVSSVIADSSRFSCNSNSVAERPAENEERKIVPSPFLGFVPVDNPNGYYLIKERMTQALRYLKDSTDQHVLAQIWAPVKNGCRNVLTTSGQPFVLDTDSNGLHQYRMASLMYMFSVDGETNEVLGLPGRVFRQKLPEWTPNVQYYSIREYPRLDYAQHYNVRGSLALPVFEPSGQSCVGVLELIMTSEKINYAPEVDKVCKALAGSKLEKCRYIRSYKHEICNEGRQNALTEILEILTAACETYKLPMAQTWVPCMHRNVLAYGGGMKKNCTSIDGSCMGQVCMSTTELAFYIIDAHMWGFREACLEHHLQKGQGVAGRAFYSRNLCFCGDITQFCKTEYPLVHYARMFGLTSCFAVCLQSSHTGNDNYVLEFFLPPSITNASEQSALLGSLLATMKKHFQSLKVASGIGLEEEGIVELVKVSAIGGLESSLECIQIPKSAESPPGPIALPNGGDMVQQDLLKQQLTVDLDTANVGQDAAHDGGSINHVSVSENKETKKTSERKRGKTEKSISLEVLQQYFAGSLKDAAKSLGVCPTTMKRICRQHGISRWPSRKINKVNRSLSKLKRVIESVQGAEGAFGLTPLATSPLPVAVASISRPSTSNGTNQQHSPSNIPSEPPMEMKDSPTTSSPRREGQVETEDQLQGGGVLSQKEFIHENGGCFSPEINRGSNHSKSGSGSREASVGTPTSHGSCQGSPANGSVIVKDPFVYSIHEQCIKVEGSPESAPQPTDELHFSVPDALVTAECQEPFGGMLIEDAGSSKDLRNLCPAADAVLDEPVPEYCWINSTCSDLAPKQTSGIITQTQPNVIVRLRQEMKSVTIKATYREDIIRFRISLSSNIVELKDEVAKRLKLELGTFDIKYMDDDQEWVLIACDADLQECMDVCRSSGSNMIRLLIHDIMPNLGSSCESTEE

SEQ ID NO: 494 - protein, 932 aa, Trema orientalis
MSESEEETTPSFPPKSSSSSKEVVPDVREGLMDFDLDLDNPWPMMDQIAFVSNPITGNSNSVAERPAENEERKIVPSPFLGLVPVDNPNGYYLIKERMTQALRYLKDSTDQHVLAQIWAPVKNGCRYVLTTSGQPFVLDPDSNGLHQYRMASLMYMFSVDGETNEVLGLPGRVFRQKLPEWTPNVQYYSIREYPRLDYAQHYNVRGSLALPVFEPSGQSCVGAVNLRSADILDHTSTQICNEGRQNALTEILEILTAACETYKLPMAQTWVPCMHRNVLAYGGGMKKNCTSIDGSCMGQVCMSTTELAFYIIDAHMWGFREACLEHHLQKGQGVAGRAFYSRNLCFCGDITQFCKTEYPLVHYARMFGLTSCFAVCLQSSHTGNDNYVLEFFLPPSITNASEQSALLGSLLATMKKHFQSLKVASGIGLEEEGIVELVKVSAIGGLESSLECIQIPKSAESPPGPIALPNGGDMVQQDLLTQQLIVDLDTANVGQDAAHDGGSVNHVSVSENKETKKTSERKRGKTEKSISLEVLQQYFAGSLKDAAKSLGVCPTTMKRICRQHGISRWPSRKINKVNRSLSKLKRVIESVQGAEGAFGLTPLATSPLPVAVASISRPSTSNGTNHQHSPSNIPSEPPMERKDSPTTSSPRREGQVETEDQLQGGGVLSQKEFIHENGGFFSPEINRGSNHSKSGSGSGEASVGTPTSHGSCQGSPANGSVIVKDPFVYSIHEQCIKVEGSPESAPQPTDELHFSVPDALVTAECQEPFGGMLIEDAGSSKDLRNLCPAADAVLDEPVPEYCWINSTCSDLAPKQTSGVITQTQPNVIVRLRQEMKNVTIKATYREDIIRFRISLSSNIVELKDEVAKRLKLELGTFDIKYMDDDQEWVLIACDADLQECMDVCRSSGSNMIRLLIHDIMPNLGSSCESTEE

SEQ ID NO: 495 - protein, 1007 aa, Trema tomentosa
MSESEEETTPSFPPKSSSSKEVVPDVREVLMDFDLDLDNPWPMMDQIAFVSNPTSPLLFSSSTDQPCSPLWAFADAENNDDDDDNNNSNNSNKLGRHVSSAIADSSRFSCNSNSVAERPAENEERKIVPSPFLGLVPVDNPNGYYLIKERMTQALRYLKDSTDQHVLAQIWAPVKNGCRYVLTTSGQPFVLDPDSNGLHQYRMASLMYMFSVDGETNEVLGLPGRVFRQKLPEWTPNVQYYSIREYPRLDYAQHYNVRGSLALPVFEPSGQSCVGVLELIMTSEKINYAPEVDKVCKALEAVNLRSADILDHTSTQICNEGRQNALTEILEILTAACETYKLPMAQTWVPCMHRNVLAYGGGLKKNCTSIDGSCMGQVCMSTTELAFYIIDAHMWGFREACLEHHLQKGQGVAGRAFYSRNLCFCGDITQFCKTEYPLVHYARMFGLTSCFAVCLQSSHTGNDNYVLEFFLPPSITNASEQSSLLGSLLATMKKHFQSLKVASGIGLEEEGIVELVKVSAIGGLESSLECIQIHKSAESPPGPIALPNGGDMVQQDLLTQQLIVDLDTANVGQDAAHDGGSVNHVSVSENKETKKTSERKRGKTEKSISLEVLQQYFAGSLKDAAKSLGVCPTTMKRICRQHGISRWPSRKINKVNRSLSKLKRVIESVQGAEGAFGLTPLATSPLPVAVTSISRPSTSNGTNHQHSRSNIPSEPPMERKDSPTTSSPRREGEVETEDQLQGGGILSQKEFIHENGGFFSPEINRGSNHSKSGSGSGEASVGTPTSHGSCQGSPANGSVIVKDPFVYSIHEQCIKVEGSPESAPQPTDELHFSVPDALGTAECQEPFGGMLIEDAGSSKDLRNLCPAADAVLDEPVPEYCWINSTYSDLAPKQTSGIITQTQPNVIVRQEMKSVTIKATYREDIIRFRISLSSNIMELKDEVAKRLKLELGTFDIKYMDDDQEWVLIACDADLQECMDVCRSSGGNMIRLLIHDIMPNLGSSCESTE

SEQ ID NO: 496 - protein, 741 aa, Trifolium pratense
MTQALRQFKEWTEQNVLAQVWAPVRNGNRYKLTTSGQPFVLDPHSNGLHQYRTVSLMYMFSVDGENDEILGLPGRVFQQKLPEWTPNVQYYSSKEYSRLNHALHYNVRGTLALPVFEPPGQSCVAVLELIMTSQKINYAPEVDKVCKALEAVNLRSSEILEYPYSQVLFTTMHDAFSLFIVTIVICNEDRQNALSEILEILTVVCETHNLPLAQTWVPCRHRSVLAHGGGLKKSCSSFDGYCMGQVCMSITEVAFYVIDSHTWGFHDACVEHHLQQGQGVAGRAFLSQNMCFCENITQFCKTDYPLVHYALMFDLTSCFSICLQSFHTGNDEYVLEFFLPPSISEFSEHKALLGSILATMKQNFQSLKVASGFELGEDGSIEIVEILNGRVHSRLESVPIIQSEKLSTRHDDASPNMDEGVLPLDPLQQKIITSFDDINDRGILDDNPGGSIARISSLETKTKKKTSQRKRGKAEKSISLDVLQNYFSGSLKDAAKSLGVCPTTMKRICRQHGISRWPSRKIKKVNRSLSKLKCVIESVHGVEGAFGLNSPTTSPLHIASNKLEHQTSLSIMPSEPKMNENDFDASKSQPQEPFIGMLIEGADSCSKDLKNMCPLADAVLEDHILEASRTNPPCFDYAPLAQKEIKIVTIKATYRDDIIRFRVSLNCGIVELREEISKRLKLEVGTFDIKYLDDDQEWILVACDADLQECIDILTSSGSNTIRLVVHDIVSILGSSVESSE

SEQ ID NO: 497 - protein, 980 aa, Trifolium pratense
MPESEEENQDFPPKTKTSLEEHVCAMDFDLDLETSWPLDHMSFISNPMSPFLFSTISDQPSSPLWNFTDGEDENHNKLAASAFSDCHKIFSCDSNSITEKPVEKDDNKTLLPPLLPPIEHLDRYCGIKEKMTQALRYFKELTEMNVLAQVWAPVRNGNRFVLTTSGQPFMLDPHSNGLNQYRTVSLMYKFSVDGENDGTLGLPGRVFQQKLPEWSPNVLYYSSKEYPRRDHAQHYNVRGTLALPVFEPSLPSCIGVLELIMTSPKINYAPEVEKICKALEAVNLRSSEILDHPFTQICNEGRQNALSEILEILTVVCETHNLPLAQTWVPCRHRSVLAHGGGFKKSCSSFDGSCMGQVCMSTTEVASYIIDAHLWGFREACVEHHLQHGQGVAGRAFLSQNMSFCSNITQFCKTDYPLVHYALMFGLTGCFAICLRSFYTGDDDYVLEFFLPPGITEFHEQKTLLGSILATLKEHFQSLKIAAGVELEENGSIEIIEATDEGIRLRTESIPIAQSIKSPFIPDASPNMEEVPQDDPSGIHGEDIGGSINPMSPLGNKNIKKPSERKRGKTEKSISLEVLQRYFAGSLKDAAKSLGVCPTTMKRICRQHGISRWPSRKINKVNRSLSKLKRVIESVQGAEGAFDLNSLSNNQLPIVSSFPEPSTPNKSNQQGSLNIKPSEPQMKENEFDASKVSETNIQAVMEDQLLGGRKHSLDKEVINDKGVSIREIGNDRKRTRTRSGSSEDSTNPASHGSCHGSPPNEISTVKDLFIPSNNEQCIVLRGSPESRVQPTNAFNSPTAHCLPDNVLAELQEPFGGMLIEDAGSSKDLRNLCPSVAEAILEDMAPEACGTNLPGSYMAPPKQCMDTINNNNSVMPFAVRKEMKTVTIKATYREDIIRFRVSLNCGIVELKEEVSKRLKLEVGTFDIKYMDDDNEWVLIACDADLQECMFVSRSSGGSNIIRVLVHDITSNLGSSCESSGE

SEQ ID NO: 498 - protein, 964 aa, Trifolium subterraneum
MPESEEENQDFPPKTKTSLEEHVCAMDFDLDLETSWPLDHMSFISNPMSPFLFSTISDQPSSPLWTFTDGEDENHNKLAASAFSDCHKIFSCDSNSITEKPVEKDENKTLLPPLLPPIENLDRYCGIKEKMTQALRYFKELTEMNVLAQIWAPVRNGNRFVLTTSGQPFVLDPHSNGLNQYRTVSLMYKFSVDGENDGTLGLPGRVFQQKLPEWSPNVLYYSSKEYPRRDHAQHYNVRGTLALPVFEPSLPSCIGVLELIMTSPKINYAPEVEKICKALEICNEGRQNALSEILEILTVVCETHNLPLAQTWVPCRHRSVLAHGGGFKKSCSSFDGSCMGQVCMSTTEVASYIIDAHLWGFREACVEHHLQHGQGVAGRAFLSQNMSFCSNITQFCKTDYPLVHYALMFGLTGCFAICLRSLYTGDDDYVLEFFLPPGITEFHEQKTLLGSILATMKEHFQSLNIASGVELEENGSIEIIEATDEGIRLRTEYIPIAQSIKSPLIPDASPNMEEVPQDNPSGIHGEDVGGSIDPMSSLANKNIKKPSERKRGKTEKSISLEVLQRYFAGSLKDAAKSLGVCPTTMKRICRQHGISRWPSRKINKVNRSLSKLKRVIESVQGAEGAFDLNSLGNNQLPIVSSFPEPSTPNKSNQQGSLSIKPSEPQMKENEFDASKASETNIHVVMEDQLLGGRKHSLDKEVINDKGVSIQEIGKDRKRTRTRSGSSEDSTNPASHGSCHGSPPNEMSNVKDLFIPSNNEQCVVLRGSPESRVQPTNAFNSPTAHCLPDNVLAELQEPFGGMLIEDAGSSKDLRNLCPSVAEAILEDMAPEACGTNLPGSYMAPPKQCMDTINNNNSVMPFAVRKEMKTVTIKATYREDIIRFRVSLNCGIVELKEEVSKRLKLEVGTFDIKYMDDDNEWVLIACDADLQECLYVSRSSGGSNIIRVLVHDITSNLGSSCESSGE

SEQ ID NO: 499 - protein, 850 aa, Trifolium subterraneum
MQESEEENHDLAKKSKPLEENGFSMDFDIDFENLWPLDHISNTMYPFLLSTTSEQHFSPIWTFSDVEDDSIAASGNNTKTETDNRVENDDKKKHVTPHHVEVVPNLQTLHGYCLIKERMTQALRQFKELTEQNVLAQVWAPVRNGNRYKLTTSGQPFVLDPHSNGLHQYRTVSLMYMFSVDGENDEILGLPGRVFQQKLPEWTPNVQYYSSKEYSRLNHALHYNVRGTLALPVFEPPGQSCVAVLELIMTSQKINYAPEVDKVCKALEAVNLRSSEILEYPYSQICNKDRQNALSEILEILTVVCETHNLPLAQTWVPCRHRSVLAHGGGLKKSCSSFDGYCMGQVCMSITEVAFYVIDSHTWGFHDACVEHHLQQGQGVSGRAFLTQNMCFCENITQFCKTDYPLVHYALMFDLTSCFSICLQSSHTGNDEYVLEFFLPPSIIEFCEHKALLGSILAIMKQNFQSLKVASGFELEEDGSIEIVEILNGRVHSRVESVPIIQSEKLSTRHDDASPNMEEGVLPLDPLQQKVITSFDDINDRRILDVNTGGNIDRISSLETKTKKKTSQRKRGKAEKSISLDVLQNYFSGSLKDAAKSLGVCPTTMKRICRQHGISRWPSRKIKKVNRSLSKLKCVIESVHGVEGAFGLNSPTTSPLHIASSSFNQPSTSNKFEHQTALNIIPSEPKMNENYLNASKSQPQEPFIGMLIEGADSCSKDLKNMCPLADTVLEDQILEASRTNPPCFDFAPLAEKEMKIVTIKATYRDDIIRFRVSLNCGIVELREEISKRLKLEVGTFDIKYMDDDQEWILVACDADLQECMDILTSSGSNIIRLVVHDIVSILGSSVEISE

SEQ ID NO: 500 - protein, 732 aa, Trifolium subterraneum
MTQALRQFKELTEQNVLAQVWAPVRNGNRYKLTTSGQPFVLDPHSNGLHQYRTVSLMYMFSVDGENDEILGLPGRVFQQKLPEWTPNVQYYSSKEYSRLNHALHYNVRGTLALPVFEPPGQSCVAVLELIMTSQKINYAPEVDKVCKALEAVNLRSSEILEYPYSQICNKDRQNALSEILEILTVVCETHNLPLAQTWVPCRHRSVLAHGGGLKKSCSSFDGYCMGQVCMSITEVAFYVIDSHTWGFHDACVEHHLQQGQGVSGRAFLTQNMCFCENITQFCKTDYPLVHYALMFDLTSCFSICLQSSHTGNDEYVLEFFLPPSIIEFCEHKALLGSILAIMKQNFQSLKVASGFELEEDGSIEIVEILNGRVHSRVESVPIIQSEKLSTRHDDASPNMEEGVLPLDPLQQKVITSFDDINDRRILDVNTGGNIDRISSLETKTKKKTSQRKRGKAEKSISLDVLQNYFSGSLKDAAKSLGVCPTTMKRICRQHGISRWPSRKIKKVNRSLSKLKCVIESVHGVEGAFGLNSPTTSPLHIASSSFNQPSTSNKFEHQTALNIIPSEPKMNENYLNASKSQPQEPFIGMLIEGADSCSKDLKNMCPLADTVLEDQILEASRTNPPCFDFAPLAEKEMKIVTIKATYRDDIIRFRVSLNCGIVELREEISKRLKLEVGTFDIKYMDDDQEWILVACDADLQECMDILTSSGSNIIRLVVHDIVSILGSSVEISE

SEQ ID NO: 501 - protein, 933 aa, Triticum aestivum
MDIDPSSVSHADGGGDLWPFDSLTTSLFFSSVSSSPPLHPLPVASSSWLTPPSPLWLFEDRQMMPIEVGPAPAAAPDNTAAVAEEAQRARSGNSDTPIKKTERLNNKWQFNLALHDDSTNSSCLFKEKLTHALRYFKESTDQHLLVQVWAPVKSGDRYVLTTSGQPFVLDHQSIGLLQYRAVSMMYMFSVDGDNAGELGLPGRVYKQKVPEWTPNVQYYSSTEYPRLNHAISYNVHGTVALPVFDPSVQSCIAVVELIMTSKKINYADEVDKVCKALEAVNLKSTEILEHPNVQICNEGRQSALVEILEILTVVCEEHKLPLAQTWVPCKYRSVLAHGGGVKKSCLSFDGSCMGEVCMSTSDVAFHVIDAHMWGFRDACVEHHLQKGQGVSGKAFIYHRPCFSKDISQFCKLEYPLVHYARMFGLAGCFAICLQSPYTGDDYYMLEFFLPPSCKEEDDQNALLESILGLINQCLRNLKVAGNGESNKASLQLSNVIMIESEDFKTNVHFENSEGFRESPEGETHGGAHEFDKANSKVSEGHLLADDNSHNNGVSVSRPNGSAASDSSLLHKNGKPPERRRGKAEKTISLEVLQQYFSGSLKNAAKSLGVCPTTMKRICRQHGISRWPSRKINKVNRSLSKLKQVIESVQGSDAAFNLTSITGPLPTIPVGPSSDSFNKEKASESKAEHSNRAVDGDRDSSLQKSQETGSHFGALMSQQGFADTGNNVQLEADKASLSRSSSGEGSINSRTSEGSCQGSPANQTFVCQPIASMFLEPQEPQLNPEGFTKEPFQEPELPLSRMLIEDSGSSKDLKNLFGSAIGQPMLAPPSNFGPMRNSGTVTIKASFKEDIVRFRFPCSSSVMALKDEVAKRLRMDAGMFDIKYLDDDHEWVKLACNADLEECIEISRHSGTHVIRLLVSDVAAHIGSSCGSSG

SEQ ID NO: 502 - protein, 881 aa, Triticum urartu
MPIEVGPAPAAAPDNTTAVAEETQRARSGNSDTPIKKTERLNNKWQFNLALHDDSTNSSCLFKEKLTHALRYFKESTDQHLLVQVWAPVKSGDRYVLTTSGQPFVLDHQSIGLLQYRAVSMMYMFSVDGDNAGELGLPGRVYKQKVPEWTPNVQYYSSTEYPRLNHAISYNVHGTVALPVFDPSVQSCIAVVELIMTSKKINYADEVDKVCKALEAVNLKSTEILEHPNVQICNEGRQSALVEILEILTVVCEEHKLPLAQTWVPCKYRSVLAHGGGVKKSCLSFDGSCMGEVCMSTSDVAFHVIDAHMWGFRDACVEHHLQKGQGVSGKAFIYHRPCFSKDISQFCKLEYPLVHYARMFGLAGCFAICLQSPYTGDDYYMLEFFLPPSCKEEDDQNALLESILGLIHQCLRNLKVAGNGESNEASLQLSNVIMIESEDFKTNVHFENPEGFRESPEGDTHGGAHEFDKANSKVSEGHLLADDNSQNNGVSVSRPNGSAASDSSLLHKNGKPPERRRGKAEKTISLEVLQQYFSGSLKNAAKSLGGLKWQQNVAACMCPTTMKRICRQHGISRWPSRKINKVNRSLSKLKQVIESVQGSDAAFNLTSITGPLPTIPVGPSSDSFNKEKASESKAEHSNRAVDGDRDSSLQKPQENGSHFGALMSQQGFADTGNNVQLEADKASLSRSSSGEGSINSRTSEGSCQGSPANQTFVCQPIASMFLEPQEPQLNPEGFTKEPFQEPELPLSRMLIEDSGSSKDLKNLFGSAIGQPMLAPPSNFGPMRNSGTVTIKASFKEDIVRFRFPCSSSVMALKDEVAKRLRMDAGMFDIKYLDDDHEWVKLACNADLEECIEISRHSGTHVIRLLVTDVAAHIGSSCGSSG

SEQ ID NO: 503 - skipped

SEQ ID NO: 504 - protein, 988 aa, Vigna angularis
MSESEEENTDCVPRSKPAEEVGCTMDFDLDLETSWPLDHMSFGSNPMSPFLFSSNSDQPYSPLWAFSDGEDAKFPASAFSDCHKIFPCDSNSIAEKPEENDDNKKLLPPLAPMTPLENVGGYCVIKERMTQALRYFKELTELNVLAQVWAPVRNGNRYVLTTSGQPFVLDPHSNGLHQYRTVSLMYMFAVDGENDGSLGLPGRVFQQKLPEWTPNVLYYSSKEYPRRDHAQHYNVRGSLALPVFEPALQSCVGVLELIMTSQKINYAPEVDKICKALETVNLRSSEILDHPYTQICNEGRQNALSEILEILTVVCETHNLPLAQTWIPCKHRSVLAQGGGVKKICSSFDGSCMGKVCMSTTDVAFYIIDAHLWGFREACVEHHLQQSQGVAGRAFLSHSMCFCSSITQFCKTDYPLVHYALMFGLTSCFAICLRSSHTGTDDYVLEFFLPPRVTDFHEQKTLLASILATMKQHFQSLKIASGVELEDGSIEIIEATIERIHTRHESIPIAPSIRSPPRPDTSPNMEEEVSLDPSEQHILMYCNGTNHGANLSDKAGGKIDHMITLETKTSKKPLERKRGKTEKSISLEVLQRYFAGSLKDAAKSLGVCPTTMKRICRQHGISRWPSRKINKVNRSLSKLKRVIESVQGAEGAFGLNSLSTSPLPIAVGSLPEPSTRNKFSQPVSMSIRPSEPQMKVNELNASKELETNREAGMEDQLVGGRIHNLERVTNDKGGSTQEIGKEPKRTRTGSGSSEDSTNPTSHGSWHDSIPNESSPVKDIFITSNHDQCAVLRRSPESTLQPATNTPNQATPFCMPEFVAAELQEPFGGMLIEDAGSSKDLRNLCPSVAEAILEDLVPEACGTNPPALDLSPKQSMGTPNKAVTPFAATKEMKTVTIKATYREDIIRFRVSLTCGIVELKEEVAKRLKLEVGTFDIKYLDDDHEWVLIACDADLQECMDVSRSPGSNIIRVLVHDITSNLGSSCESSGE

SEQ ID NO: 505 - protein, 876 aa, Vigna angularis
MTPLENVGGYCVIKERMTQALRYFKELTELNVLAQVWAPVRNGNRYVLTTSGQPFVLDPHSNGLHQYRTVSLMYMFAVDGENDGSLGLPGRVFQQKLPEWTPNVLYYSSKEYPRRDHAQHYNVRGSLALPVFEPALQSCVGVLELIMTSQKINYAPEVDKICKALETVNLRSSEILDHPYTQICNEGRQNALSEILEILTVVCETHNLPLAQTWIPCKHRSVLAQGGGVKKICSSFDGSCMGKVCMSTTDVAFYIIDAHLWGFREACVEHHLQQSQGVAGRAFLSHSMCFCSSITQFCKTDYPLVHYALMFGLTSCFAICLRSSHTGTDDYVLEFFLPPRVTDFHEQKTLLASILATMKQHFQSLKIASGVELEDGSIEIIEATIERIHTRHESIPIAPSIRSPPRPDTSPNMEEEVSLDPSEQHILMYCNGTNHGANLSDKAGGKIDHMITLETKTSKKPLERKRGKTEKSISLEVLQRYFAGSLKDAAKSLGVCPTTMKRICRQHGISRWPSRKINKVNRSLSKLKRVIESVQGAEGAFGLNSLSTSPLPIAVGSLPEPSTRNKFSQPVSMSIRPSEPQMKVNELNASKELETNREAGMEDQLVGGRIHNLERVTNDKGGSTQEIGKEPKRTRTGSGSSEDSTNPTSHGSWHDSIPNESSPVKDIFITSNHDQCAVLRRSPESTLQPATNTPNQATPFCMPEFVAAELQEPFGGMLIEDAGSSKDLRNLCPSVAEAILEDLVPEACGTNPPALDLSPKQSMGTPNKAVTPFAATKEMKTVTIKATYREDIIRFRVSLTCGIVELKEEVAKRLKLEVGTFDIKYLDDDHEWVLIACDADLQECMDVSRSPGSNIIRVLVHDITSNLGSSCESSGE

SEQ ID NO: 506 - protein, 1040 aa, Vigna angularis
MSESKEENPDFLPKSKPQEEHGFAMDFDIGFESLWPLDHLSLVSNPMSPFLLSTIEQPFSPVWAFSDVEDEQIRIATAGNTKAVIENPVENYDNKKYVSPSLVAVPPSENSDGYCLIKERMTQALRHFKELTEQNVLAQVWAPVRNGNRYALTTSGQPFVLDPHSNGLHQYRTVSLRYMFSVDGENDEILGLPGRVFQQKIPEWTPNVQYYSSKEYQRLNHAQHYNVRGTLALPVFEPAGHSCVAVLELIMTAPKINYAPEVDKICKALEAVNLRSSEILEHPYNQVVFYYHASLILFIFSKDIYIYTYIYMYVCICIYVCCSVISILPLCYHRYNLAILLNQICNEDRQHALAEILEILTIVCETHSLPLAQTWVPCKHRSVLAHGGGHKKSCSSFDGCCMGQVCMSITEVAFYVIDAHTWGFHEACVEHHLQQGQGVAGRAFLSHNMCFCGNITQFCKTEYPLVHYALMFGLTSSFAVCLQSSHTGNDEYVIEFFLPPRITEFNEQKTLLRSILATMKPHFQSLKIAAGVELEQNCSIEIIEPRKERVHLWFESIPITQSSMSPPRHASPSMGERLPLEPSEQQITTDFDDINDGRNLGDNTDGHIDQNTSLEPRTKKKPSERKRGKAEKSISLDVLQHYFTGSLKDAAKSLGVCPTTMKRICRQHGISRWPSRKIKKVNRSLSKLKCVIESVHGAEGAFGLNSLSNGSLPIAAGSFSEPSTSNKFNCQTSLTIRPSEPKINEQDFDASRASEKNRQAGLEAHFLSTRTQNPEKAINEKVVAVQEIGTKGTTRFRTGSGSSEESANPSPHGSCQGSPPNEMSPPKDIFVTGTSEQCLVLRGSLGSTLHSTSTPNRATANPMPNFVETTEPQEPFGGQLLEGVGSSKDLRNLCRSADAVLEDQVPEPCRMNPQCSDLAPVQHMDTNNMTPFAVRKELKNVTIKASYKEDIIRFKISLNCGIVELKEEIAKRLKLEEGTFDIKYLDDDHEWVLIACDADLQECMDISRSSGSNIIRLVVHDILPILGSSCESSGDWKGCI

SEQ ID NO: 507 - protein, 983 aa, Vigna angularis
MSESKEENPDFLPKSKPQEEHGFAMDFDIGFESLWPLDHLSLVSNPMSPFLLSTIEQPFSPVWAFSDVEDEQIRIATAGNTKAVIENPVENYDNKKYVSPSLVAVPPSENSDGYCLIKERMTQALRHFKELTEQNVLAQVWAPVRNGNRYALTTSGQPFVLDPHSNGLHQYRTVSLRYMFSVDGENDEILGLPGRVFQQKIPEWTPNVQYYSSKEYQRLNHAQHYNVRGTLALPVFEPAGHSCVAVLELIMTAPKINYAPEVDKICKALEAVNLRSSEILEHPYNQICNEDRQHALAEILEILTIVCETHSLPLAQTWVPCKHRSVLAHGGGHKKSCSSFDGCCMGQVCMSITEVAFYVIDAHTWGFHEACVEHHLQQGQGVAGRAFLSHNMCFCGNITQFCKTEYPLVHYALMFGLTSSFAVCLQSSHTGNDEYVIEFFLPPRITEFNEQKTLLRSILATMKPHFQSLKIAAGVELEQNCSIEIIEPRKERVHLWFESIPITQSSMSPPRHASPSMGERLPLEPSEQQITTDFDDINDGRNLGDNTDGHIDQNTSLEPRTKKKPSERKRGKAEKSISLDVLQHYFTGSLKDAAKSLGVCPTTMKRICRQHGISRWPSRKIKKVNRSLSKLKCVIESVHGAEGAFGLNSLSNGSLPIAAGSFSEPSTSNKFNCQTSLTIRPSEPKINEQDFDASRASEKNRQAGLEAHFLSTRTQNPEKAINEKVVAVQEIGTKGTTRFRTGSGSSEESANPSPHGSCQGSPPNEMSPPKDIFVTGTSEQCLVLRGSLGSTLHSTSTPNRATANPMPNFVETTEPQEPFGGQLLEGVGSSKDLRNLCRSADAVLEDQVPEPCRMNPQCSDLAPVQHMDTNNMTPFAVRKELKNVTIKASYKEDIIRFKISLNCGIVELKEEIAKRLKLEEGTFDIKYLDDDHEWVLIACDADLQECMDISRSSGSNIIRLVVHDILPILGSSCESSGDWKGCI

SEQ ID NO: 508 - protein, 988 aa, Vigna radiata
  REGION 1..988: note = var. radiata
MSESEEENTDCVPRSKPAEEGGCTMDFDLDLETSWPLDHMAFGSNPMSPFLFSSNSDQPYSPLWAFSDGEDTKFPASAFSDCHKIFPCDSNSIAEKPEENDDNKKILPPLAPMPPLENVGGYCVIKERMTQALRYFKELTELNVLAQVWAPVRNGNRYVLTTSGQPFVLDPHSNGLHQYRTVSLMYTFAVDGENDGSLGLPGRVFQQKLPEWTPNVLYYSSKEYPRRDHAQHYNVRGSLALPVFEPALQSCIGVLELIMTSQKINYAPEVDKICKALETVNLRSSEILDHPYTQICNEGRQNALSEILEILTVVCETHNLPLAQTWIPCKHRSVLAQGGGVKKICSSFDGSCMGKVCMSTTDVAFYIIDAHLWGFREACVEHHLQQSQGVAGRAFLSHSMCFCSNITQFCKTDYPLVHYALMFGLTSCFAICLRSSHTGTDDYVLEFFLPPRITDFHEQKTLLASILATMKQHFQSLKIASGVELEDGSVEIIEATIERIHTRLESIPIAPSIRSPPRPDTSPNMEEEGPLDPSEQHILMYCNGTNHGSNLSDQAGGKIDHMITLETKTSKKPLERKRGKTEKSISLEVLQRYFAGSLKDAAKSLGVCPTTMKRICRQHGISRWPSRKINKVNRSLSKLKRVIESVQGAEGAFGLNSLGTSPLPIAVGSLPEPSTPDKFSQPVSMNIRPSEPQMKVNELNASKELETNREAGMEDQLVGGRIHNIERVTNDKRGFTQEIGKEPKRTRTGSGSSEDSTNPPSHGSWHDSIPNESSHVKDLFITSNHDQCAVLRRSPESTLQPATNTPNQSTPFRMPEFVAAELQEPFGGMLIEDAGSSKDLRNLCPSVAEAILEDLVPEACGTNPPALDLSPKQSMGAPNKTVTPFAATKEMKTVTIKATYREDIIRFRVSLTCGIVELKEEVAKRLKLEMGTFDIKYLDDDHEWVLIACDADLQECMDVSRSSGSNIIRVLVHDMTSNLGSSCESSGE

SEQ ID NO: 509 - protein, 984 aa, Vigna radiata
  REGION 1..984: note = var. radiata
MSESKEENPDFLPKSKPQEEHGFAMDFDIGLESLWPLDHISSVSNPMSPFLLSTIEQPFSPVWAFSDVEDEKQIRIAIAGNTKAVTENPVENYDNKKYVSPSLVAVPPSENSDGYCLIKERMTQALRHFKELTEQNVLAQVWAPVRNGNRYALTTSGQPFVLDPHSNGLHQYRTVSLRYMFSVDGENDEILGLPGRVFQQKIPEWTPNVQYYSSKEYQRLNHAQHYNVRGTLALPVFEPAGQSCVAVLELIMTSPKINYAPEVDKICKALEAVNLRSSEILEHPYNQICNEDRQHALAEILEILTIVCETHSLPLAQTWVPCKHRSVLAHGGGHKKSCSSFDGCCMGQVCMSITEVAFYVIDAHTWGFHEACVEHHLQQGQGVAGRAFLSHNMCFCGNITQFCKTEYPLVHYALMFGLTSSFAVCLQSSHTGNDEYVIEFFLPPRITEFNEQKTLLRSILATMKPHFQSLKIAAGVELEQNCSIEIIEARKERVHLWFESIPITQSSMSPPRHASPNMGERLPLEPSEQQTTTDFDDINDGRNLGDNTDGHIDQNTSLEPRTKKKPSERKRGKAEKSISLDVLQHYFTGSLKDAAKSLGVCPTTMKRICRQHGISRWPSRKIKKVNRSLSKLKCVIESVHGAEGAFGLNSLSTGSLPIAAGSFSEPSTSNKFNRQTSLTIRPSEPKINEQDFDASRASETNRQAGLEGQFLSTRTQNPEKVINEKVVAIQEIGTKGTTRFRTGSGSSEESANPSPHGSCQGSPPNEMSPPKDIFVTGISEQCLVLRGSLGSTLHSTSIPNHATAYPIPNFVETTEPQEPFGGQLLEGVGSSKDLRNLCPSTDAVLEDQVPEPYRMNPQCSDLAPVQHRDTNNMTPFAVRKEVKNVTIKATYREDIIRFKISLNCVIVELKEEIAKRLKLEEGTFDIKYLDDDHEWVLIACDADLQECMDISRSSGSNIIRLVVHDILPILGSSCESSGDWKCCI

SEQ ID NO: 510 - protein, 921 aa, Zea mays
MDFDPSPASAHGDGSGGAWPFDSLTTSMLFSSVSASPQLPASSSSWLTPPSPLWLFEDRHLLPLDAPSAAPEAAVAAAVVEEVQRARSGKRVDQINHKWQFHLSLDEDGTDNSSFFKEKLTQALRYFKESTDQHLLVQVWAPVKNGDRYVLTTSGQPFVLDHQSIGLLQYRAVSMMYMFSVDGENAGDLGLPGRVYKQKVPEWTPNVQYYSSGEYQRLNHAISYNVHGTVALPVFDPSAQSCIAVVELIMTSKKINYACEVDKVCKALEAVNLKSTEILDHPNVQICNEGRQAALVEILEILTVVCEEHKLPLAQTWVPCKYRSVLAHGGGLKKSCLSFDGSCMGEVCMSTSDVAFHVIDAHMWGFRDACVEHHLQRGQGVSGKAFISHKPCFSKDIRKFCKLAYPLVHYARMFGLSGCFAICLQSSYTGNDDYILEFFLPLDCIDEDDQNALLESILTLMKRCLRSLKLVDDNDLSGVSLHLSNVLKLENEESKTDAQFDGSLRESPEDDRHGGSHKFDNENQKVLDITEGQLLTDDYSQDNGTSVGRPNGSGASDSSLLHKTNKPPERRRGKAEKTISLEVLQQYFSGSLKNAAKSLGVCPTTMKRICRQHGISRWPSRKINKVNRSLSKLKQVIESVQGSDAAFNLTSITGPLPIPVGPSPESLNVEKLTQSKVAELSNLAVGVDRDSLQKSLENDDHFDIVMAQQGFIDNNNDVQLEADKASHSRSSSGEGSINSRTSEGSCQGSPANQTFVCKPIASMFAEPQLNQEEFNKEPFQEPQLPLSRMLIEDSGSSKDLKNLFTSTSDQPFLAPPNNLVSMKHSGTVTIKASFKEDIVRFRFPCSGGVIVLKEEVAKRLRMDVGTFDIKYLDDDHEWVKLACNADLEECMEISRLSGSHVIRLLVSDIAAHFGSSCGSSG

SEQ ID NO: 511 - protein, 873 aa, Zea mays
MAATLGCSTPCPRRSTFRPFRPRCRRRGRAATRIILPCGWTRLPCKTTARASPPEKLTVALMYFKESTKQHLLVQVWVPIRKGDHYMLSTSGQPFVLDEQSIGLLDYRAVSMMYTFAVDGDSVEELGLPGRVYKQRLPEWTPDVQYYSSIEYARLNHAISYDVHGTVALPVFDSSMKSCIAVVELIMTSKKVNYAREVGEVSKALEAVNLKSTEVIEHPYVQIFNEGHQNVLVEMLEIITVICEELKLPIAQTWVPCKYQNLLIHCGGENKSCFDIHESCAQELCMSTSAVMFHIIDAHMWGFRDACVEHHLKKGQGVSGKAFILRRPCFTKDVTRFSKMEYPLVHYARMFGLAGCFSICLQSAYNRNEDYVLEFFLPPDCREDGEQKVLLDSILALLRQYLNRLQVATDEGSNEVYLQVDAITIIENGDIKNAHVQHMNCEGGIHASDERNMHVIHESDSQKRISPTESETCPSPDNTKCNDKLFARQNGGCISDSLLLENNSKHSGRRQGKEEKTFSLEVIQQYFTGSLKNAAKSLGVCPTTMKRICRQHGISRWPSRQISKVNRTVSKLKKVIESVEGHEGAFTLTSVTGPLPVAFGPSNPISIKNQSQINVSGLPIPSVQENRDSSSQSKLLENDIHRSTLVPQKSFLANINRQIEAEKASNSRNSSKDCRTHSGRSEESYPVSPANMTFVSTLLEPQQNMYIQDGFTKESFQKEDLRFHGMFVNGSGSLKDCMNHITSAVNGTIIGHPGSLTTAQNSGIITCPGSLISAQNSRIVTVKARYKEDLLRFRFPCSGSFITLKDEVAKRIQMDGVLFDIKYLDDDHEWVKLTCDTDLEECMEISRASGSNVLRLLVTDIAPVLGSSCGSTG

SEQ ID NO: 512 - protein, 927 aa, Zea mays
MDFDPSPASAHGDGSGGAWPFDSLTTSMLFSSVSASPQLPASSSSWLTPPSPLWLFEDRHLLPLDAPSAAPEAAVAAAVVEEVQRARSGNSHTTGKRVDQINHKWQFHLSLDEDGTDNSSFFKEKLTQALRYFKESTDQHLLVQVWAPVKNGDRYVLTTSGQPFVLDHQSIGLLQYRAVSMMYMFSVDGENAGDLGLPGRVYKQKVPEWTPNVQYYSSGEYQRLNHAISYNVHGTVALPVFDPSAQSCIAVVELIMTSKKINYACEVDKVCKALEAVNLKSTEILDHPNVQICNEGRQAALVEILEILTVVCEEHKLPLAQTWVPCKYRSVLAHGGGLKKSCLSFDGSCMGEVCMSTSDVAFHVIDAHMWGFRDACVEHHLQRGQGVSGKAFISHKPCFSKDIRKFCKLAYPLVHYARMFGLSGCFAICLQSSYTGNDDYILEFFLPLDCIDEDDQNALLESILTLMKRCLRSLKLVDDNDLSGVSLHLSNVLKLENEESKTDAQFDGSLRESPEDDRHGGSHKFDNENQKVLDITEGQLLTDDYSQDNGTSVGRPNGSGASDSSLLHKTNKPPERRRGKAEKTISLEVLQQYFSGSLKNAAKSLGVCPTTMKRICRQHGISRWPSRKINKVNRSLSKLKQVIESVQGSDAAFNLTSITGPLPIPVGPSPESLNVEKLTQSKVAELSNLAVGVDRDSLQKSLENDDHFDIVMAQQGFIDNNNDVQLEADKASHSRSSSGEGSINSRTSEGSCQGSPANQTFVCKPIASMFAEPQLNQEEFNKEPFQEPQLPLSRMLIEDSGSSKDLKNLFTSTSDQPFLAPPNNLVSMKHSGTVTIKASFKEDIVRFRFPCSGGVIVLKEEVAKRLRMDVGTFDIKYLDDDHEWVKLACNADLEECMEISRLSGSHVIRLLVSDIAAHFGSSCGSSG

SEQ ID NO: 513 - protein, 916 aa, Zea mays
MDLDPAYPPSACADAWPFDSLTTSLLFSPQLTPIPANSSFSWLTPHSPLWLFEDRHLLPLDAPAVFEEVQRPRSGNSHTSSKPAEQISHRWQFHLSLDEDGTDNSSLFKEKLTHALRYFKESTDQHLLVQVWAPVKNGDRYVLTTSGQPFVLDHQSIGLLQYRAVSMTYMFSVDAENVGDLGLPGRVYKQKVPEWTPNVQYYSSGEYQRLNHAISYNVHGTVALPVFDPSAHSCIAVVELIMTSKKINYACEVDKVCKALEAVNLKSTEIHDHPNVQICNEGRQAALVEILEILTVVCEEHKLPLAQTWVPCKYRSVLAHGGGLKKSCLSFDGSCMGEVCMSTSDVAFHVIDAHMWGFRDACVEHHLQRGQGVPGKAFISHKPCFSKDIRKFCKLAYPLVHYARMFGLAGCFAICLQSSYTGNDDYILEFFLPPDCSDEDDQNALLESVLTLMKRCLRSLKVVGDRDLSGVSLHLSNVLKLENEEFKTDAQFDNSDGSLCQSPNGDRHGGSHEFDGGNKKVLDVPEGQLLTDDFSQGNGTSAGRPNGSGASDSSVLHKTNKPPERKRGKAEKTISLEVLQQYFSGSLKNAAKSLGVCPTTMKRICRQHGISRWPSRKINKVNRSLSKLKQVIESVQGSDAAFNLTSITGPLPIPVGPSLDSLNVEKLTQSKVAELSNIAVDGDRDSLQKSLGNDGHFGIVMPQQGSTDHNNDTQLEADKASHSRSSSGEGSINSRTSEGSCQRSPANQTFVCKPIASTFAEPQLNPEEFNKEPFQEPQLPLSRMLIEDSGSSKDLKNLFTSTSDQPFLAPPNNLVPMKHSGSVTIKASFKEDIVRFRFSCSGSVIVLKEEVAKRLRMDVGTFDIKYLDDDHEWVKLTCNSDLEECMEISRLSGSHVIRLSVSDIATHFGSSCGSSG

SEQ ID NO: 514 - protein, 647 aa, Zea mays
MDLDPAYPPSACADAWPFDSLTTSLLFSPQLTPIPANSSFSWLTPHSPLWLFEDRHLLPLDAPAVFEEVQRPRSGNSHTSSKPAEQISHRWQFHLSLDEDGTDNSSLFKEKLTHALRYFKESTDQHLLVQVWAPVKNGDRYVLTTSGQPFVLDHQSIGLLQYRAVSMTYMFSVDAENVGDLGLPGRVYKQKVPEWTPNVQYYSSGEYQRLNHAISYNVHGTVALPVFDPSAHSCIAVVELIMTSKKINYACEVDKVCKALEAVNLKSTEIHDHPNVQICNEGRQAALVEILEILTVVCEEHKLPLAQTWVPCKYRSVLAHGGGLKKSCLSFDGSCMGEVCMSTSDVAFHVIDAHMWGFRDACVEHHLQRGQGVPGKAFISHKPCFSKDIRKFCKLAYPLVHYARMFGLAGCFAICLQSSYTGNDDYILEFFLPPDCSDEDDQNALLESVLTLMKRCLRSLKVVGDRDLSGVSLHLSNVLKLENEEFKTDAQFDNSDGSLCQSPNGDRHGGSHEFDGGNKKVLDVPEGQLLTDDFSQGNGTSAGRPNGSGASDSSVLHKTNKPPERKRGKAEKTISLEVLQQYFSGSLKNAAKSLGVCPTTMKRICRQHGISRWPSRKINKVNRSLSSSPYSCWPFIGFSQCREINSK

SEQ ID NO: 515 - protein, 603 aa, Zea mays
MDLDPAYPPSACADAWPFDSLTTSLLFSPQLTPIPANSSFSWLTPHSPLWLFEDRHLLPLDAPAVFEEVQRPRSGNSHTSSKPAEQISHRWQFHLSLDEDGTDNSSLFKEKLTHALRYFKESTDQHLLVQVWAPVKNGDRYVLTTSGQPFVLDHQSIGLLQYRAVSMTYMFSVDAENVGDLGLPGRVYKQKVPEWTPNVQYYSSGEYQRLNHAISYNVHGTVALPVFDPSAHSCIAVVELIMTSKKINYACEVDKVCKALEAVNLKSTEIHDHPNVQICNEGRQAALVEILEILTVVCEEHKLPLAQTWVPCKYRSVLAHGGGLKKSCLSFDGSCMGEVCMSTSDVAFHVIDAHMWGFRDACVEHHLQRGQGVPGKAFISHKPCFSKDIRKFCKLAYPLVHYARMFGLAGCFAICLQSSYTGNDDYILEFFLPPDCSDEDDQNALLESVLTLMKRCLRSLKVVGDRDLSGVSLHLSNVLKLENEEFKTDAQFDNSDGSLCQSPNGDRHGGSHEFDGGNKKVLDVPEGQLLTDDFSQGNGTSAGRPNGSGASDSSVLHKTNKPPERKRGKAEKTISLEVLQQYFSGSLKNAAKSLGGRKPLLSA

SEQ ID NO: 516 - protein, 644 aa, Zea mays
MDLDPAYPPSACADAWPFDSLTTSLLFSPQLTPIPANSSFSWLTPHSPLWLFEDRHLLPLDAPAVFEEVQRPRSGNSHTSSKPAEQISHRWQFHLSLDEDGTDNSSLFKEKLTHALRYFKESTDQHLLVQVWAPVKNGDRYVLTTSGQPFVLDHQSIGLLQYRAVSMTYMFSVDAENVGDLGLPGRVYKQKVPEWTPNVQYYSSGEYQRLNHAISYNVHGTVALPVFDPSAHSCIAVVELIMTSKKINYACEVDKVCKALEAVNLKSTEIHDHPNVQICNEGRQAALVEILEILTVVCEEHKLPLAQTWVPCKYRSVLAHGGGLKKSCLSFDGSCMGEVCMSTSDVAFHVIDAHMWGFRDACVEHHLQRGQGVPGKAFISHKPCFSKDIRKFCKLAYPLVHYARMFGLAGCFAICLQSSYTGNDDYILEFFLPPDCSDEDDQNALLESVLTLMKRCLRSLKVVGDRDLSGVSLHLSNVLKLENEEFKTDAQFDNSDGSLCQSPNGDRHGGSHEFDGGNKKVLDVPEGQLLTDDFSQGNGTSAGRPNGSGASDSSVLHKTNKPPERKRGKAEKTISLEVLQQYFSGSLKNAAKSLGVCPTTMKRICRQHGISRWPSRKINKVNRSSPYSCWPFIGFSQCREINSK

SEQ ID NO: 517 - protein, 1117 aa, Zea mays
MEAVSMSPSTVSSHTHDDHDAASVTEAMSLQEGLLFSDTLKDLRNLRSQLYSAAEYFEVFYRNNSHKSTVMTSLKDYTVEALVSTVDHLGFVSYKVDNLVSEKAVEVKETEFLVSSVEQMIVLLTQSASLDLLESSIHPVSEPPRYSRQYTGRKMHKSQSSISTPVRRQATMRNKGRLPDTKFQPDGTVRLYGCKKTAFELEAFETSFHAVAQRLGAAGEKLKQRQEGFPQLTPIPANSSFSWLTPHSPLWLFEDRHLLPLDAPAVFEEVQRPRSGNSHTSSKPAEQISHRWQFHLSLDEDGTDNSSLFKEKLTHALRYFKESTDQHLLVQVWAPVKNGDRYVLTTSGQPFVLDHQSIGLLQYRAVSMTYMFSVDAENVGDLGLPGRVYKQKVPEWTPNVQYYSSGEYQRLNHAISYNVHGTVALPVFDPSAHSCIAVVELIMTSKKINYACEVDKVCKALEAVNLKSTEIHDHPNVQICNEGRQAALVEILEILTVVCEEHKLPLAQTWVPCKYRSVLAHGGGLKKSCLSFDGSCMGEVCMSTSDVAFHVIDAHMWGFRDACVEHHLQRGQGVPGKAFISHKPCFSKDIRKFCKLAYPLVHYARMFGLAGCFAICLQSSYTGNDDYILEFFLPPDCSDEDDQNALLESVLTLMKRCLRSLKVVGDRDLSGVSLHLSNVLKLENEEFKTDAQFDNSDGSLCQSPNGDRHGGSHEFDGGNKKVLDVPEGQLLTDDFSQGNGTSAGRPNGSGASDSSVLHKTNKPPERKRGKAEKTISLEVLQQYFSGSLKNAAKSLGVCPTTMKRICRQHGISRWPSRKINKVNRSLSKLKQVIESVQGSDAAFNLTSITGPLPIPVGPSLDSLNVEKLTQSKVAELSNIAVDGDRDSLQKSLGNDGHFGIVMPQQGSTDHNNDTQLEADKASHSRSSSGEGSINSRTSEGSCQRSPANQTFVCKPIASTFAEPQLNPEEFNKEPFQEPQLPLSRMLIEDSGSSKDLKNLFTSTSDQPFLAPPNNLVPMKHSGSVTIKASFKEDIVRFRFSCSGSVIVLKEEVAKRLRMDVGTFDIKYLDDDHEWVKLTCNSDLEECMEISRLSGSHVIRLSVSDIATHFGSSCGSSG

SEQ ID NO: 518 - protein, 980 aa, Zea mays
MAPHLTPHHSLLPSSSVSPSPPAPPLPPPTSPLAAAFRRPVTLAQPAAARFHPMDFDPSPASAHGDGSGGAWPFDSLTTSMLFSSVSASPQLPASSSSWLTPPSPLWLFEDRHLLPLDAPSAAPEAAVAAAVVEEVQRARSGNSHTTGKRVDQINHKWQFHLSLDEDGTDNSSFFKEKLTQALRYFKESTDQHLLVQVWAPVKNGDRYVLTTSGQPFVLDHQSIGLLQYRAVSMMYMFSVDGENAGDLGLPGRVYKQKVPEWTPNVQYYSSGEYQRLNHAISYNVHGTVALPVFDPSAQSCIAVVELIMTSKKINYACEVDKVCKALEAVNLKSTEILDHPNVQICNEGRQAALVEILEILTVVCEEHKLPLAQTWVPCKYRSVLAHGGGLKKSCLSFDGSCMGEVCMSTSDVAFHVIDAHMWGFRDACVEHHLQRGQGVSGKAFISHKPCFSKDIRKFCKLAYPLVHYARMFGLSGCFAICLQSSYTGNDDYILEFFLPLDCIDEDDQNALLESILTLMKRCLRSLKLVDDNDLSGVSLHLSNVLKLENEESKTDAQFDGSLRESPEDDRHGGSHKFDNENQKVLDITEGQLLTDDYSQDNGTSVGRPNGSGASDSSLLHKTNKPPERRRGKAEKTISLEVLQQYFSGSLKNAAKSLGVCPTTMKRICRQHGISRWPSRKINKVNRSLSKLKQVIESVQGSDAAFNLTSITGPLPIPVGPSPESLNVEKLTQSKVAELSNLAVGVDRDSLQKSLENDDHFDIVMAQQGFIDNNNDVQLEADKASHSRSSSGEGSINSRTSEGSCQGSPANQTFVCKPIASMFAEPQLNQEEFNKEPFQEPQLPLSRMLIEDSGSSKDLKNLFTSTSDQPFLAPPNNLVSMKHSGTVTIKASFKEDIVRFRFPCSGGVIVLKEEVAKRLRMDVGTFDIKYLDDDHEWVKLACNADLEECMEISRLSGSHVIRLLVSDIAAHFGSSCGSSG

SEQ ID NO: 519 - protein, 1144 aa, Zea mays
MEAVSMSPSTVSSHTHDDHDAASVTEAMSLQEGLLFSDTLKDLRNLRSQLYSAAEYFEVFYRNNSHKSTVMTSLKDYTVEALVSTVDHLGFVSYKVDNLVSEKAVEVKETEFLVSSVEQFFTPLVLMIDCRGFEFANRQLTRRQDPSKLFLSRRQSLDLLESSIHPVSEPPRYSRQYTGRKMHKSQSSISTPVRRQSTMRNKGRLPDTKFQPDGTVRLYGCKKTAFELEAFETSFDAVAQRLGAAGEKLKQRQEGFPQLTPIPANSSSSWLTPHSPLWLFEDRHLLPLDAPAVFEEVQRPRSGNSHTSSKPAEQISHRWQFHLSLDEDGTDNSSLFKEKLTHALRYFKESTDQHLLVQVWAPVKNGDRYVLTTSGQPFVLDHQSIGLLQYRAVSMTYMFSVDAENVGDLGLPGRVYKQKVPEWTPNVQYYSSGEYQRLNHAISYNVHGTVALPVFDPSAHSCIAVVELIMTSKKINYACEVDKVCKALEAVNLKSTEIHDHPNVQICNEGRQAALVEILEILTVVCEEHKLPLAQTWVPCKYRSVLAHGGGLKKSCLSFDGSCMGEVCMSTSDVAFHVIDAHMWGFRDACVEHHLQRGQGVPGKAFISHKPCFSKDIRKFCKLAYPLVHYARMFGLAGCFAICLQSSYTGNDDYILEFFLPPDCSDEDDQNALLESVLTLMKRCLRSLKVVGDRDSSGVSLHLSNVLKLENEEFKTDAQFDNSDGSLCQSPNGDRHGGSHEFDGGNKKVLDVPEGQLLTDDFSQGNGTSAGRPNGSGASDSSVLHKTNKPPERKRGKAEKTISLEVLQQYFSGSLKNAAKSLGVCPTTMKRICRQHGISRWPSRKINKVNRSLSKLKQVIESVQGSDAAFNLTSITGPLPIPVGPSLDSLNVEKLTQSKVAELSNIAVDGDRDSLQKSLENDGHFGIVMPQQGYIDHNNDTQLEADKASHSRSSSGEGSINSRTSEGSCQRSPANQTFVCKPIASTFAEPQLNPEEFNKEPFQEPQLPLSRMLIEDSGSSKDLKNLFTSTSDQPFLAPPNNLVPMKHSGSVTIKASFKEDIVRFRFSCSGSVIVLKEEVAKRLRMDVGTFDIKYLDDDHEWVKLACNSDLEECMEISRLSGSHVIRLSVSDIATHFGSSCGSSG

SEQ ID NO: 520 - protein, 914 aa, Zea mays
MEFDFDSHGGDAWLLDAMSTSLHFSAVSPPVPSPWPCGDPHHPSMWLDTVALQDDGPSVPAEKSEISKKCEHLNGKCQVHLSLVDGCSDSSYFLKEKLTVALMYFKESTKQHLLVQVWVPIRKGDHYMLSTSGQPFVLDEQSIGLLDYRAVSMMYTFAVDGDSVEELGLPGRVYKQRLPEWTPDVQYYSSIEYARLNHAISYDVHGTVALPVFDSSMKSCIAVVELIMTSKKVNYAREVGEVSKALEAVNLKSTEVIEHPYVQIFNEGHQNVLVEMLEIITVICEELKLPIAQTWVPCKYQNLLIHCGGENKSCFDIHESCAQELCMSTSAVMFHIIDAHMWGFRDACVEHHLKKGQGVSGKAFILRRPCFTKDVTRFSKMEYPLVHYARMFGLAGCFSICLQSAYNRNEDYVLEFFLPPDCREDGEQKVLLDSILALLRQYLNRLQVATDEGSNEVYLQVDAITIIENGDIKNAHVQHMNCEGGIHASDERNMHVIHESDSQKRISPTESETCPSPDNTKCNDKLFARQNGGCISDSLLLENNSKHSGRRQGKEEKTFSLEVIQQYFTGSLKNAAKSLGVCPTTMKRICRQHGISRWPSRQISKVNRTVSKLKKVIESVEGHEGAFTLTSVTGPLPVAFGPSNPISIKNQSQINVSGLPIPSVQENRDSSSQSKLLENDIHRSTLVPQKSFLANINRQIEAEKASNSRNSSKDCRTHSGRSEESYPVSPANMTFVSTLLEPQQNMYIQDGFTKESFQKEDLRFHGMFVNGSGSLKDCMNHITSAVNGTIIGHPGSLTTAQNSGIITCPGSLISAQNSRIVTVKARYKEDLLRFRFPCSGSFITLKDEVAKRIQMDGVLFDIKYLDDDHEWVKLTCDTDLEECMEISRASGSNVLRLLVTDIAPVLGSSCGSTG

SEQ ID NO: 521 - protein, 915 aa, Zea mays
MDLDPAYPPSACADAWPFDSLTTSLLFSPQLTPIPANSSFSWLTPHSPLWLFEDRHLLPLDAPAVFEEVQRPRSGNSHTSSKPAEQISHRWQFHLSLDEDGTDNSSLFKEKLTHALRYFKESTDQHLLVQVWAPVKNGDRYVLTTSGQPFVLDHQSIGLLQYRAVSMTYMFSVDAENVGDLGLPGRVYKQKVPEWTPNVQYYSSGEYQRLNHAISYNVHGTVALPVFDPSAHSCIAVVELIMTSKKINYACEVDKVCKALEAVNLKSTEIHDHPNVQICNEGRQAALVEILEILTVVCEEHKLPLAQTWVPCKYRSVLAHGGGLKKSCLSFDGSCMGEVCMSTSDVAFHVIDAHMWGFRDACVEHHLQRGQGVPGKAFISHKPCFSKDIRKFCKLAYPLVHYARMFGLAGCFAICLQSSYTGNDDYILEFFLPPDCSDEDDQNALLESVLTLMKRCLRSLKVVGDRDLSGVSLHLSNVLKLENEEFKTDAQFDNSDGSLCQSPNGDRHGGSHEFDGGNKKVLDVPEGQLLTDDFSQGNGTSAGRPNGSGASDSSVLHKTNKPPERKRGKAEKTISLEVLQQYFSGSLKNAAKSLGVCPTTMKRICRQHGISRWPSRKINKVNRSLSKLKQVIESVQGSDAAFNLTSITGPLPIPVGPSLDSLNVEKLTQSKVAELSNIAVDGDRDSLQKSLGNDGHFGIVMPQQGSTDHNNDTQLEADKASHSRSSSGEGSINSRTSEGSCQRSPANQTFVCKPIASTFAEPQLNPEEFNKEPFQEPQLPLSRMLIEDSGSSKDLKNLFTSTSDQPFLAPPNNLVPMKHSGSVTIKASFKEDIVRFRFSCSGSVIVLKEEVAKRLRMDVGTFDIKYLDDDHEWVKLTCNSDLEECMEISRLSGSHVIRLSVSDIATHFGSSCGSS

SEQ ID NO: 522 - protein, 685 aa, Zea mays
DVISSFIALSLCFYYPGNSHTTGKRVDQINHKWQFHLSLDEDGTDNSSFFKEKLTQALRYFKESTDQHLLVQVWAPVKNGDRYVLTTSGQPFVLDHQSIGLLQYRAVSMMYMFSVDGENAGDLGLPGRVYKQKVPEWTPNVQYYSSGEYQRLNHAISYNVHGTVALPVFDPSAQSCIAVVELIMTSKKINYACEVDKVCKALEAVNLKSTEILDHPNVQSILTLMKRCLRSLKLVDDNDLSGVSLHLSNVLKLENEESKTDAQFDGSLRESPEDDRHGGSHKFDNENQKVLDITEGQLLTDDYSQDNGTSVGRPNGSGASDSSLLHKTNKPPERRRGKAEKTISLEVLQQYFSGSLKNAAKSLGVCPTTMKRICRQHGISRWPSRKINKVNRSLSKLKQVIESVQGSDAAFNLTSITGPLPIPVGPSPESLNVEKLTQSKVAELSNLAVGVDRDSLQKSLENDDHFDIVMAQQGFIDNNNDVQLEADKASHSRSSSGEGSINSRTSEGSCQGSPANQTFVCKPIASMFAEPQLNQEEFNKEPFQEPQLPLSRMLIEDSGSSKDLKNLFTSTSDQPFLAPPNNLVSMKHSGTVTIKASFKEDIVRFRFPCSGGVIVLKEEVAKRLRMDVGTFDIKYLDDDHEWVKLACNADLEECMEISRLSGSHVIRLLVSDIAAHFGSSCGSSG

SEQ ID NO: 523 - protein, 1009 aa, Ziziphus jujuba
MSESEEETPSFPPKSKDVVDDVREAALMDFDLEIASPWPLDQIAFVSNPMSPLTFSSTEQPYSPLWAFCDGDNDEKLAGNVNSPIADCPRMISCDSNSVTETPAEKMNEDKRVWISPLLGPAPIENLDGYCLIKEKMNQALRYLKDSTDQHILAQVWAPVKNGCQYVLATSGQPFVLDPHSNGLHQYRMVSLMYMFSVDGDSEGALGLPGRVFRQKLPEWTPNVQYYSIREYPRLGHAQHYNVQGTLAVPVFEPSGQACVGVLELIMTSPKINYAPEVDKVCKALEAVNLKSSEILDHTGTQICNEGRQNALTEILEILTVVCETHKLPMAQTWVPCMHRNVLTYGGGLKKSCTSFDGSCMGQVCMSITDVAFYIIDSSMWRFREACLEHHLQKGQGVAGRAFLTHNLCFCADITQFCKIEYPLVHYARMFGLTSCFAICLRSTHTGDDDYILEFFLPPSISDSSQQQIFLGSLLATMKKHFQSLRVASGVGFDEEVFVEIIQASSSEGLDSRLECIQVSQSPESSPGPNILSNVGDIVQPDSSPHQLIEDFCAANDRSTAAQDGRSHSHVSLRESKDTKKTSERKRGKTEKSISLEVLQQYFAGSLKDAAKSLGVCPTTMKRICRQHGIPRWPSRKINKVNRSLSKLKRVIESVQGAEGAFGLTPLSSSPLPVSVASVSQPFMLNGTNSPSPKACEPLTEKKKQQTSFSLGREGLAGMEEPLLGGVLRPEELIHENIRFLPEIGRGLNQSKSGSSSREASAGTPTSHGSCQGSPANGSAAEKDYLASCQDSPANGTTIIKDPISSIHEQCVKVDVSPESALQPTDELLKFPVACSIDALVTTESQEPFGRMLIEDAGSSKDLRNLCPTADAILDEQVPEFCWVNPQCLDLATKLPMGTLAPTTSHLKPRQEMKSVTIKATYREDIIRFRITLGSGIVELKEEVAKRLKLEVGTFDIKYMDDDHEWVLIACDADLQECMDICISSGSNMIRLLVHDIMPNLGSSCESTE

SEQ ID NO: 524 - protein, 822 aa, Ziziphus jujuba
MSESEEETPSFPPKSKDVVDDVREAALMDFDLEIASPWPLDQIAFVSNPMSPLTFSSTEQPYSPLWAFCDGDNDEKLAGNVNSPIADCPRMISCDSNSVTETPAEKMNEDKRVWISPLLGPAPIENLDGYCLIKEKMNQALRYLKDSTDQHILAQVWAPVKNGCQYVLATSGQPFVLDPHSNGLHQYRMVSLMYMFSVDGDSEGALGLPGRVFRQKLPEWTPNVQYYSIREYPRLGHAQHYNVQGTLAVPVFEPSGQACVGVLELIMTSPKINYAPEVDKVCKALEAVNLKSSEILDHTGTQICNEGRQNALTEILEILTVVCETHKLPMAQTWVPCMHRNVLTYGGGLKKSCTSFDGSCMGQVCMSITDVAFYIIDSSMWRFREACLEHHLQKGQGVAGRAFLTHNLCFCADITQFCKIEYPLVHYARMFGLTSCFAICLRSTHTGDDDYILEFFLPPSISDSSQQQIFLGSLLATMKKHFQSLRVASGVGFDEEVFVEIIQASSSEGLDSRLECIQVSQSPESSPGPNILSNVGDIVQPDSSPHQLIEDFCAANDRSTAAQDGRSHSHVSLRESKDTKKTSERKRGKTEKSISLEVLQQYFAGSLKDAAKSLGVCPTTMKRICRQHGIPRWPSRKINKVNRSLSKLKRVIESVQGAEGAFGLTPLSSSPLPVSVASVSQPFMLNGTNSPSPKACEPLTEKKKQQTSFSLGREGLAGMEEPLLGGVLRPEELIHENIRFLPEIGRGLNQSKSGSSSREASAGTPTSHGSCQGSPANGSAAEKDYLASCQDSPANGTTIIKDPISSIHEQCVKNLKNHLGEC

SEQ ID NO: 525 - protein, 621 aa, Amborella trichopoda
MQEAVNPQESLFGSLSEAMDFDFIDEALDGGSWLDAVDCSDLSQPGPSTSSSLLDPSYFVSPVYINTQNPQNTDQDYQEQAVIFENPMENPSENLETQSMNHNSISKLGFPDSQWPPNSTTGSIMKRWVNPNLVSPVNDRLMQAIQIIKESTSNGDVLVQIWVPVKKGDSHVLTTCEQPFILDPRSQTLTRYRTVSMNYFFSAGEGSGGVLGLPGSNEYPRVNYAQEFDVRGTLALPVFEKGSRACLGVVEVIMTDQKINYAPELDKICRALQAVDLRSSEVLTPPYVKVRNDGFQSAFPEILDVLKAVCETHRLPLAQTWVPCIQHGKKGSRHTDESYKDCVSTADGACYVRDSEMTGFQEACSEHHLFKGQGVAGKAFATNQPCFSPDVTSFSKMDFPLVHYARVFGLGAAVAIRLKSTYTGAADYVMEFFLPVDCRDNEEQKMMLNSLSVTIQQVCRSLRVVTDKELEDEMMTQVNDVFCSDKMASKSRKADVENPSGDLNKSSSGVGASWREKTGVFLSSMPSGFQEGRDIMVAQSCHWGSPRVSCHEGGRFFKVEQHQDSANNSADRGQSFVGELDFSNAGKGPEKRRAKTEKNISLQVLRQYFAGSLKDAAKSIG

SEQ ID NO: 526 - protein, 910 aa, Amborella trichopoda
MASSSLLCSGGEAAETMAESCNFFEFMDSIGGYYSLDLDASDFQASFPTFTPQSSNYQVFSLFSLPQSSNLEEEILDKWVSSDSSQLFDSGFSPIDISEPGENIIQGPGLMKVHAISGKPIENLRQNKANEIDVKLENRGEKPFFDSNESCVLKERMMLAIRNFKDSAEHNVLVQVWVPIKNGDKFVLTTSGQPFALDHQSTSLLRYRTVSLTYAFSTDKEDEGNLGLPGRVFQKKRPEWTPNVQFYSRKEYPRLNHALLYDVRGSLAVPIFEASGESCIGVVELITTLQKISYAPEVDKVCKALEAVNFKVPEIVDHPNVQISNDGHRAALAEIRKILISVCDIHNIPLAQTWVPCYYCDVKNYVAVMKDNDSCLKIGDRKVCMSANNAAFCVNEAHVWGFRDACSEHHLKGSEGIVGGAFTSKGPCFCDNICSFSKTEYPLVHYAYMFGLSGSLALHLQSLYAGSGDYVLEIFLPLNCKGKAEQRKLLVSMLATIKQCCQNSFLVLSKEVHDEKSVQMIEICRNVENGGNIPGSHKNCQGHHEMYQEQERSCKSTLHETSGHRDLLRQDTMNYNVKLSDIEAKRCEVNSVGEIKFGRRGLERGRGKLEKSVSMVVLQQYFAGSLKDAAKSVGVCPTTLKRICRQHGIRRWPSRKINKVNNSLRKLQGEIESVRGIDGPFTVTSFTNSSISWPAPSDHKTFTTTHCTRPIAMEAKCLDSDSEPIIDKLSKYNCYFSDAIPGQRDIIAPRDESMERPMTSEFCLSSFSPQSSDPSFALEYKKRFCTERPKSEHMQIARSVSCKDLSELPHGLEWVTIKTSYQDDMVIRFRLSSGSGIFDLHREVSKRFKMEVGAFGIKYFDNDKGNWVLLSCDADLHKCIDASTSSGARVIRLSMTFSNQATRMREAQLI

SEQ ID NO: 527 - protein, 993 aa, Amborella trichopoda
MDLDLDMDGAWVNESTNEDVASGYAFSPNCQELSFCSLSPSHNIPDFSQFPTQPDKTTETQVTQQFEASSSLPKTMYNPESYSPMWLFSDNSFPLKISENDPQITIPGNIDPESGLKQEKSIDLTNCDGSNGLPGPNHMMGLSEKNQTGGFIVISESNSNEKSDKASNNQNWVVDERSESDGSCVLKARMMQALRYFKESTEQHVLVQVWAPVKNGDKYVLTTSGQPFVLDPHSNGLLQYRTVSLMYVFSTDPEKDSDLGLPGRVFRKKLPEWTPNVQYYSSNEYARLTHAMHYNVRGTLALPVFEPLGQSCVGVVELIMTAQKINYAPEVDKVCKALEAVNLKSSEILDHPNLQICNEGRQAALAEILEIVTVVCETHSLPLAQTWVPCRHRSVLAHGGGSRKSCTSFDGSCMGQVCMSTTDVAFYVVDAHMWGFRDACSEHHLQKGQGVTGRAFESHRPRFSRDITQFSKTEYPLVHYARMFGLAGALAICLRSTHTGSDDYILEFFLPPNCKDTTEQQRLLDSLATTIQGCRRSLRVVSDQELMEENVLEIIEGSMNGGGDMMIEGETGQNCANVHITQESGEPHENDELQLLEQQRPSEVEVHKDDGKLINTEQEHAAAPLSKGKNVKKGLERRRGKAEKTISLEVLKQYFAGSLKDSAKSIGVCPTTLKRICRQHGISRWPSRKINKVNRSLSKLQRVIESVHGAEGAFNLPVALGPIPLSTDLKASKEHSHHSVEKERETPPSKTLEEEHPNSQVEPLIRIESDVHQQLGDVGYTVHESKSKSDVGDEATEAPTSQGSCLSSPTSETQLNNLHTSLIHEIESFDGFRPIVDAGSCKDLSSLCNMGTEDIPEEQLPEPNGVQEPLPLSLEPHPPFQPAIVSPFVQETQADIKSVAVKASYKEDIIRFRLRFTSGVVELNEEVAKRLKLEMGTFDIKYLDDDQEWVLLACDADLQECIDILMASMGHVIRLLVHDVVSNLGSSCESSGE

SEQ ID NO: 528 - protein, 1025 aa, Amborella trichopoda
MDHLFVHRAPGTGPWCSSQGVPSVPDNMGVEDSFSFSEIMDFDSYVEPSVAGDQVSPVYGFNNSYPIGDVPTYYAPVSSNPNSNPATGNSLVGFGVPLEYRDPVTNPTASFYPRPFSPEEEVIAGAPYFKTNTKSDAYDRKNTYQYVYKSPVDPTKASCYRPSVRQEGDNGSNCGSFVGQSEHEEILKRNINTKEWMVKQMDSRQNFTIPRSPGLILSEKLLKALSLFRGYCGGNILAQVWMPVRQGDQYVLTTCEQPYLLDQILAGYREVSRGFFFSAKGTEGAFPGLPGRVFISGLPEWTPDVSYYKRAEYLRADHARRNEVHGSLALPVFEPHDSSCLAVLELVTTKKKASFGEEMENICHALQAVNLRSREAKVHFQIISENRKAALAEILDLLRAVCHAHKLPLAQTWTPCKQKFMPRLEDGETLEKVLLSIEKSACYANDPQLDGFMDACAENHLEKGRGIVGKALQSNKPFFSKDVKEYDILEYPLAHHARRFALCAAVAIRLRSSHTSDDDYVLEFFLPLNCTGSLEQQLVLNNLSSTIQRICRSLRTVSEAELAECNTVGVFGKDERKSSSLMGMHGKCSDPPLSKAMGIQNPVLDKVEGDVDHEQTTTDSKRQFERKRNTAERNISLSVLQQYFSGSLKDAAKSIGVCPTTLKRICRQHGISRWPSRKINKVNRSLRKLQIVIDSVQGAEGSLKFDVLTGGFVTGASKLHDGDNQIPFSTSPKSSPIVLLNVTPKKKVREEAASSIEEIRKSEINFQSLHSNKTELSGTPSLPMAFKIEKDPVSVSPIGVIDEPKAATSFCSGLEQMPWAFSQTNLRSSFVGRETCERMDTNKDHMSIESSECLIRTRSSSSLAAVDELENGVYAMDGMVENNQPSSSGMTDSSNSSGSMINGSATSSPTMPVSCKSKVYLRDGSSRVTVKATYKDDVVRFKFLPCLGYFQLFEEVGRRFKLSIGTFQLKYLDDEEEWVLLMNDSDLNECLEILESYGAHSVKLMVRDLPCVMGSSEGSTCAPLG

SEQ ID NO: 529 - protein, 840 aa, Amborella trichopoda
MASSSLLCSGGEAAETMAESCNFFEFMDSIGENIIQGPGLMKVHAISGKPIENLRQNKANEIDVKLENRGEKPFFDSNESCVLKERMMLAIRNFKDSAEHNVLVQVWVPIKNGDKFVLTTSGQPFALDHQSTSLLRYRTVSLTYAFSTDKEDEGNLGLPGRVFQKKRPEWTPNVQFYSRKEYPRLNHALLYDVRGSLAVPIFEASGESCIGVVELITTLQKISYAPEVDKVCKALEAVNFKVPEIVDHPNVQISNDGHRAALAEIRKILISVCDIHNIPLAQTWVPCYYCDVKNYVAVMKDNDSCLKIGDRKVCMSANNAAFCVNEAHVWGFRDACSEHHLKGSEGIVGGAFTSKGPCFCDNICSFSKTEYPLVHYAYMFGLSGSLALHLQSLYAGSGDYVLEIFLPLNCKGKAEQRKLLVSMLATIKQCCQNSFLVLSKEVHDEKSVQMIEICRNVENGGNIPGSHKNCQGHHEMYQEQERSCKSTLHETSGHRDLLRQDTMNYNVKLSDIEAKRCEVNSVGEIKFGRRGLERGRGKLEKSVSMVVLQQYFAGSLKDAAKSVGVCPTTLKRICRQHGIRRWPSRKINKVNNSLRKLQGEIESVRGIDGPFTVTSFTNSSISWPAPSDHKTFTTTHCTRPIAMEAKCLDSDSEPIIDKLSKYNCYFSDAIPGQRDIIAPRDESMERPMTSEFCLSSFSPQSSDPSFALEYKKRFCTERPKSEHMQIARSVSCKDLSELPHGLEWVTIKTSYQDDMVIRFRLSSGSGIFDLHREVSKRFKMEVGAFGIKYFDNDKGNWVLLSCDADLHKCIDASTSSGARVIRLSMTFSNQATRMREAQLI

SEQ ID NO: 530 - protein, 800 aa, Amborella trichopoda
MKVHAISGKPIENLRQNKANEIDVKLENRGEKPFFDSNESCVLKERMMLAIRNFKDSAEHNVLVQVWVPIKNGDKFVLTTSGQPFALDHQSTSLLRYRTVSLTYAFSTDKEDEGNLGLPGRVFQKKRPEWTPNVQFYSRKEYPRLNHALLYDVRGSLAVPIFEASGESCIGVVELITTLQKISYAPEVDKVCKALEAVNFKVPEIVDHPNVQISNDGHRAALAEIRKILISVCDIHNIPLAQTWVPCYYCDVKNYVAVMKDNDSCLKIGDRKVCMSANNAAFCVNEAHVWGFRDACSEHHLKGSEGIVGGAFTSKGPCFCDNICSFSKTEYPLVHYAYMFGLSGSLALHLQSLYAGSGDYVLEIFLPLNCKGKAEQRKLLVSMLATIKQCCQNSFLVLSKEVHDEKSVQMIEICRNVENGGNIPGSHKNCQGHHEMYQEQERSCKSTLHETSGHRDLLRQDTMNYNVKLSDIEAKRCEVNSVGEIKFGRRGLERGRGKLEKSVSMVVLQQYFAGSLKDAAKSVGVCPTTLKRICRQHGIRRWPSRKINKVNNSLRKLQGEIESVRGIDGPFTVTSFTNSSISWPAPSDHKTFTTTHCTRPIAMEAKCLDSDSEPIIDKLSKYNCYFSDAIPGQRDIIAPRDESMERPMTSEFCLSSFSPQSSDPSFALEYKKRFCTERPKSEHMQIARSVSCKDLSELPHGLEWVTIKTSYQDDMVIRFRLSSGSGIFDLHREVSKRFKMEVGAFGIKYFDNDKGNWVLLSCDADLHKCIDASTSSGARVIRLSMTFSNQATRMREAQLI

SEQ ID NO: 531 - protein, 1231 aa, Bathycoccus prasinos
MRLKSGRSPRESETNSDMNRDEDITNASRGKTSTTFTTHEKKEGTVEDGSEQHPQFAVTLLEKHQEQQQQQQQQQNDLTSPPPTKGQDEKPNEMSRARRKKNEAIAVVSELYRLHEVGKKTNFRVTQEGLYQTMVELVNNISARVEKSNMVQMWVPRIAGKSVVMTTHGELCKISAKKKTHDSVLAKKFTENTTAFFFNCEVTNGEGMLGLPGRCYVLSRPEFTPSVTSYRPMEYVRVACAYECRIHTTMCLPVFLSEEAMKSERPFTILEVALCHMTESIGELYAATAHEFMKLGLFTTGHDRVGPERYMRKFIESTVETLAPGHANALELMCETLNVPFAQFWIESNGLIVTAGCPYFVKEKECQSYRDMSSQISLMIGQGPVGQAHSKETLIWVDDVQKASQIEWPLHHTSILLGLRGLCACKMRIDCVLPDGTKKKTDAILEILLNPKLQTSAEQIQTVEEVWSYLQRGVRVDNTKNAPDGASAPAVPDSPLAATAGVRGNDEQPASMLMELPDLTGKNNNTDTTREGKNNDDKTGKGKGAAPMTTLQAVEHISMVNKGPDEKNKTSAPWGITLELLQTQFSKHLKDAATDLGVGSTTLKRICRQYGIGRWPRRSLKSKQYKAMKEAAKQQSSQNKLRKARSSGGHSSGGSPRDGGSSFKSSGGDSDAVAGESVHGPGGRMSGGGSLSNLAKTGDGSPLGDGLFTMGSTGGAPIRGKEGSGGVGALLGSGEEGRSHGGFQAFRGIATQGQFDWGDEEERERGASWHAGSGFVSHGRLKNAKGQIVASGSQHGGHTASQFFGAQQHQQPHQSMPIAPAMQQGDFGLAAEKAETKTPNKKYKKDVAVGTKAGAGKAAVPFSFDDHFYETVHGAHNFSQQLYPHQYNNNDDSVHGSTYSESAHGGSHYNGGSMHGNPGGDHSVHGTTALAGILNNTLGGFDDDLFIANDTMEEADADMMAILLNEGEKVEEVPQLVVKFRVGADTIRFRLLHKWSVQMLLDRIRKLIVFPDSAKLKYMDDEDDMCILQSEHDLDECIKFTEHRKKESGNSGNNKSATNDPVVIGESNAQNNARQQQQQQQQQKQELLATGFAPNKPNGGEITIFICLADGSMPSLNAYELIKQDIHSIPPSLSASVNARRDQLTINVKVTHDNDTCRFLLEPKMNHVTLMEHVLKLFGIQKETSSSSHYHRLTYLDDSEEWITLAGDLDLDECRALCGCSPSLRMKLLDR

SEQ ID NO: 532 - protein, 1196 aa, Chlamydomonas reinhardtii
MNTGMAYNNGGELKQRLSRALLDVSGTLATVKSGALVQVWMPECTHDGTIVLSCQGLPFAVAGVGDLLALFRCVSVRYRFSTDVMKPSLMGAIGRVYSTLEPEMSHNVQKYDKQVYLRVSEAQRCRVHSTLIIPIFGSDARDTPLAVFELVQGDRDVTFPAVLSQLSASLQNVNLFTIDLETAATAAGLRKWPMHIDMLPASEFSSGAAGTAAGAAGGTAAAGSGPARLSPNGEGQGLHRRLGSARLADVAEDKEPAASSNVIATEEREHQSPSTSRQDEVGSWGAKRTSLTRVSTGNLHGAGGGAAGSGPVHMPTAAGGGATAGAGGIKLSSSPQTMQGPLAAAGTSPPGAGAGTGVPSVALSMPVPVPVQGMSQLTASGSGHAAGPGGAAAGLAGAGGSGLLPGSAPALLKLETAGSAGTSDGLGARQAMTPPAPVPGPPLDPNNAAQLMAWLSQQGNAGNAALDQIKALLEQQQQQQQQQQQQQQQQQQMQLQQQLQQLQALQQQQMQQQAQSQALQVRQARMSESMSVPGALAAQQLQLQQQQQQQQAPHQHQQGPMMMDVTVGSSGPLQHLAGAAVSTPSPPTTGSGLAQACSGDTNANAAGPNTLVAAVAAAAAAEQQQQQQQQAAAQMQQAAIQQAVAQASTAAAAAASMNNKLSRSGSAPRVQAAAAGAAAGDAGDDGDEEDISSGGDDDDSDDERGGGGNPRNNNRVGGGAGKRLRFEDLQAQFGLGLKEAANNLGICATTLKRACRRHGIKRWPRRQIAKLSKALNQMGYQGAPPPGLVQNAVINGVGPGGTATTATKPKPKPKPDPVALQHATQMLLAQQQAALVAAAAANGGNMAAFPSIAAAAAAGMMQVHQGHMAAAAMAPHGVYALTAGQQGAGGGGQPGSATAGGGQSMFPTHGTTTIMTPMGPMQVATQPGGGPGAGGQGMMVGGGGMQGGLTPMQMQAMGMQGTGAGGMGAVGLHPLLAAGGGYNIQQALQQHMQQQQQGMQQQQQQQQQPGAPLLGSMQNLQALQQQQQQQEALQQQQQLLQQQQQQHHHQFQHHQQQHQQQQQQSQQQVAGSSPGVSWLTHAMGGGGGGGGGGMHMGVMPPGTGCGSAATAMDIGPRVSAGDAPSPFSGLGLSPGITDSGIPDIPEDFIANLNGAGAGPGAGGGMAPMTASMFKTNAANSELLGLFDDELAGISAR

SEQ ID NO: 533 - protein, 754 aa, Chlamydomonas reinhardtii
MNTGMAYNNGGELKQRLSRALLDVSGTLATVKSGALVQVWMPECTHDGTIVLSCQGLPFAVAGVGDLLALFRCVSVRYRFSTDVMKPSLMGAIGRVYSTLEPEMSHNVQKYDKQVYLRVSEAQRCRVHSTLIIPIFGSDARDTPLAVFELVQGDRDVTFPAVLSQLSASLQNVNLFTIDLETAATAAGLRKWPMHIDMLPASEFSSGAAGTAAGAAGGTAAAGSGPARLSPNGEGQGLHRRLGSARLADVAEDKEPAASSNVIATEEREHQSPSTSRQDEVGSWGAKRTSLTRVSTGNLHGAGGGAAGSGPVHMPTAAGGGATAGAGGIKLSSSPQTMQGPLAAAGTSPPGAGAGTGVPSVALSMPVPVPVQGMSQLTASGSGHAAGPGGAAAGLAGAGGSGLLPGSAPALLKLETAGSAGTSDGLGARQAMTPPAPVPGPPLDPNNAAQLMAWLSQQGNAGNAALDQIKALLEQQQQQQQQQQQQQQQQQQMQLQQQLQQLQALQQQQMQQQAQSQALQVRQARMSESMSVPGALAAQQLQLQQQQQQQQAPHQHQQGPMMMDVTVGSSGPLQHLAGAAVSTPSPPTTGSGLAQACSGDTNANAAGPNTLVAAVAAAAAAEQQQQQQQQAAAQMQQAAIQQAVAQASTAAAAAASMNNKLSRSGSAPRVQAAAAGAAAGDAGDDGDEEDISSGGDDDDSDDERGGGGNPRNNNRVGGGAGKRLRFEDLQAQFGLGLKEAANNLGICATTLKRA

SEQ ID NO: 534 - protein, 477 aa, Chlorella variabilis
MAGEEPSGPRSLVLTAQDRAIVVSRLARAVLRFQDSFLCSEGSPAGLLCQASGMAVWLPEVVEDNQIVLKTKGLPFCVAGMGDLLALFRCISCRFAFGTNAAGSSGPFFRSGPRLHGMRACLGLSFADRRLEAQYVRQLDAAQAPADCAYSALCVVMAAVLVSQALEQADLHLIESALAAMFWMSLPLVVCLSSRSLYISYRSLWLCAWLLPAWWFMCQAAAAYSPHMQPAAPPLMPPPQPPEAGAWHHALSAATQRCRPAAQLIVRTSMLPLLWSNLGARQVFRRHWPLQAACLAIAASFNGRRCSWLLVRLPGVAAAAGRFSGDARKMSRLLTPQLLPMVAAQLREAGWRLGAGSGGTCSTHTADSSGSCAVAPPASTAAAAAGQGSQSEAPRQQLAACLEVLLFARLLLCYVAPCLALWHSELSSRRHFLDACSERSARSERLPRMPAFHLAWLAPLAVATCWQAAEAAVALGY

SEQ ID NO: 535 - protein, 727 aa, Coccomyxa subellipsoidea C-169
MVNTEVYDLPHSVEQRGAMASRIARAVLNFQDQLLEADSNTGSLCQVWLPEVSEDGDVVLRTKGLPFCVAGVGDLLALFRCISCRYCFGTDATKPDMLGAPGRVFTTQEPEMSRNVQKYSKEVYLRASEAQQCRVHSTVVLPLFTSADRKSSLGVVEVVQTRQDMSFAEIVSNLARSLEDCNLFTCEGLRGKEMAESSDAIKQMVKGGLVPSSSTRSNSSEADKAAATGDAENEGTSGLTGRASTASISVDLADAASLEAERKKSLGTRTRNASLAADLRAALRQQSLRDSAPKEALAAAAAAPTAGAGAEQMSARGGSLSEEEVDMDEDDDLEDETEEERARRKGKGAGNPGKPGKRLRLEDLQSQFGVGLKEAANRLGICPTTLKRACRRHGIQRWPRRQLLKLSRAIDQINATGSVKSADGSSPAANGLQPLPGPDTRWTALAQLIPGIAVQPDNRQPHKTLPSTQALALTHSTDQRMLQRVDSSASVDPYVAAAAAEQLQRYHSNGSLQQGSPVGAASAGYGLPSHASAQHLHRHDSGAVAGADALAGDGSVHRGQAAFQYLAAAGPSVDAHMQQAQHYGSANSTPMPIPAGSAAHLAHSYPGAMPVGTQPAMMPQVFDGGQQISAPLSMPAMSLSHVHPPTGQHQSPPMMVGGEGSYRGQDLLSYSNQRTMIDAKMDEHTHNWMQHAGNGAQHHLDLFPSVDDLDDDVGLVDAEVLEMLLSR

SEQ ID NO: 536 - protein, 779 aa, Coccomyxa subellipsoidea C-169
MSAGQTIVSWDMRYPAAFTYNPQNSRESASQHAQLNMKLAQVVVKFTSSLSSTGTGTLSQIWLPSISEDGSVVLGTQGVPFSVSGTVDLLALFRCISCRFKFTTDVTDPSNMGVVGRVFASGEPEFSHNVQTYSKSVYLRVSDAQRCRVHSTMLLPMYMDPQRDHPFAVFEVCQTEKNVLFPSLVDLFQRCLEDVNLYTVDIEKHSMGIGLRCWPSSLDYTGKDSASVATFAPEAAACTDMETLCSADSLQRLKAASVNGATDVHGEEVLRASSGVGGGKSEGMARLVSVGNRLELDLEPLLMTSKGGGGGGGGNCGLESGTQGSEALGSRRPPMRLEVGLPAAAAALLNGFDGDKARLKGQLSSFGLQYAAVPPRDMAQFGVGLREAAANLRICPTTLKRACRRHGITRWPRRQLAKLNRSEGSKSDGSGDLPNIKVEGSYRSAARLSGQQPAVSSAASPRTSAQLGAERREGVTTRSFSAATSAGRPAAPSGSSPGIFSPLDFPPDMQQQPFYLSGNPSSTGILDLFQSIGPSGSAGMDDLEALQERDPEFYNYLKQTDSGLLDFKEDDSDEEEAGGTSESIQDGEEEERGNERLPVIESGAAEEQLEDQEILTPKTLDAWCLEATQHASLRAMRKLLKVFRVACHYGDSEAEVHETLRATSSSVFNKLLIFMLKEADGIFRNLLDLPDDAAILSSSFKKTKSGMLVFILRKLRTSIPFMGYFQRLQRKYMRQAISIFSTNEAAPRVQALVFVRQMAVMLPEPAMDQAVKVSANAII

SEQ ID NO: 537 - protein, 878 aa, Gonium pectorale
MAYNQLVGGLDLKQRLSKALLDVSGSLASVKSGALVQGLPFSVAGVGDLLALFRCVSVRYRFSTDVMKPTLMGAIGRVYSTLEPEMSHNVQKYDKQVYLRVSEAQRCRVHSTLMVPIFGCGSRDTPLAVFELVQGDRDVTFPAVMSHLFNALQSVNLFTTDLETVASAAGLRKWPMHIDMLPTAELVGGVGAGRLSPTRDEQQRAGNEGAEQKPAASSNIVATGLEGNAQQIVSWLTTQGANGSVALGQLRALIEQQQQLQKQQAQAQALKAEQAAMAAAGTVNGQAPMPPGAVPPVNGDSPPTKNGLLAQIQQQQQQQAGWDLGASSASAVMASNDKANKLARSTSAPRALGTDADDGDGEDISSGGDDDDSDDERGGHRNNNRIGGGAGKRLRFEDLQAQFGLGLKEAANNLGICATTLKRACRRHGIKRWPRRQIAKLSKALNQMGYSGAPPSGMVQNAAVNGVGVSSATQAPAKPKPAKKPDPAALHQATQLFFQQQLSAAAVAANGGVFPNMAAAAAAQGMMMGAQVQVQGVPHGMHMAMFAGAGGHIAQAAAAAAAAQQQQQQQQQQQQQQQQQHLQQQGVYQGGPFMGASMGATMGAAMMAQHAAHAAGMNGSMAPGAHMLLANGMGGMHGMPGMAAMGAMQAGTVGGVQHSALSMQQLAAGGGAAGGAMHMQAAGGNGLALQGAPSGMLHPLLASTAGFQMQQALQQQQQQQQQQQQLQHHQQSMQAAQQLQQAMQQPHQQGSGAGSMSQLGSGDRVGWLNQGPASGGTMATAVSAGHTVGVSSSMDIVGPRPSCGDAPSPFSGLGMSPGFSGGAGDICLPEIPEEFLQNAMGQSGAGMGQSGKSGNMGAGSIELMDFHGDLLGDDLATR

SEQ ID NO: 538 - protein, 530 aa, Parachlorella kessleri
MAQQPRALVLAEDDRIVVIKRLARAVLKFQDNFLDRESSPAGLLCQASSTLVWLPEVTGENEVVLKTKGMPFCVAGLGDLLALFRCISCRFAFGTDVKKVSQLGAPGRVFTSSEPELTCNVQKYSKTAYLRKAEAEQCQVQSTLLLPVFLSSQRHGCVGVLEVVQTSEDMRFMEVAALIANVLEKCQLYTCPQSSIERQLSRATTVATVLLPPSVDILRPAQGGSEGSNGRANSTDGVPMADEGVLEQAALGGSTGQVASEGGLPAGAAAAGSDDEGYDDDDLESGDEGDEGVAEAGGGARPSRSGARSTGTAGDRPSRRRGKGSGNPGKPGVRLSLEDLQSQFGVGLKEAAARLGICPTTLKRACRQAEGGAGAGTRHGIQRWPRRQLMKVNQALDQMEAQAPLGALAQQAQQSQHMRKPMQQLGGGLGGLPAPDTRWTALAQFIPAFQQTLQYNDNLLGFGPGQGGQLGLPGLHQEQGDARPRQGSGSGALSHWVFVGGVAPVIVHGLLHTSVGIGGRKEAERQLHGR

SEQ ID NO: 539 - protein, 1107 aa, Physcomitrella patens
MELPQASRACVPRWRPTTEFGGHGQQQQVVSQAMGVLAGLGGSAGESKFVMDEAVLTDLMELEPLHEQLLGESWAEGNYGDYGGYLALPASSHGGVFAGPVPALASLQAFSYANGSLAASVQAFQQELMLQQALESSQQQSIPGASSSQSSLAMSSAVVSGMSSYSAAVGGRSLSSPSLSEAAHMLLGNQGLAGVVARDGRGMGDSRGGVDGRNGKVEIGEGGVVDKEDDKSSVSTVEGNPVSSGNLEAGVRRPRIAAELPLPLRDRMMEALRLIGQSLEDVLVQVWMPVVQGSRKCLLTREQPFVVEPNNEQLWLYRNMTEGYEFPAERAEGKVLELPGRVFTGQQAEWTPNVQYYSSQEYLRVKEAQRCDIRGSLAVPVLDPVSRQCVAVIELVGRAEKIQYGPDVDIIARALQAVNLTCPVGLETPPLERSSWGRQAALAEIAEVLKGVCEAHKLPLAQTWVPTYRYGGRGDAKAQSHNAVQVNGGRGVRKVVLRIVDGDGPCYVGEARMWGFRRACLEHALEKGQGVPGKAMLTNLPVFDSDVKSFSKDEYPLGHYAKLFGLVSAVAIRLRSVHTGDEDFILEFFLPMDCVESEKQQQMLNSLSITMQRICQSLRTLSERELEEERRVAMAESIEMQAKAVKLEAKEVCNKEDFLAWRGGFNRHGGGVNGEETSPAFSQVMQQQHGVQQAARFVPQRSALQQFSHGVLLGRGRDDGLRIPESHVYPGYHSEQLPVEQGLGMGGFGCPGLGQDVASHRRRFERRRGTTEKTIGLNVLQQYFAGSLKDAAKSIGVVSSLEEKVLDGSNGDDGQGRAQVDNGDMCRSNDGNSTSSGGSNPNVKAGYGSNGGHYCPGMSPLASGSMLTGGDADRGDDGGKRSVGTAFQGVGNAGKGSGAGKGQQASPLGRSGEQPVPGRGGAGRVSDLVRGATPRGWNESRVHGGGGALAALKGGDQHGSHGFSEDPVSSCNRANDGEEEVTGCGLESPGFGSSPASDCSSPSTGVNGTSNKKAWAGQEDGAAITVKVTHGLDTVRVKFSRNGSFVELKEEVRRRLKLVGQKFSLKYLDDDEEWMLLACDADLQESIDLMRVSGRHAIKLMVCNSML

SEQ ID NO: 540 - protein, 1244 aa, Physcomitrella patens
MELPQASRACVPRWRPTTEFGGHGQQQQVVSQAMGVLAGLGGSAGESKFVMDEAVLTDLMELEPLHEQLLGESWAEGNYGDYGGYLALPASSHGGVFAGPVPALASLQAFSYANGSLAASVQAFQQELMLQQALESSQQQSIPGASSSQSSLAMSSAVVSGMSSYSAAVGGRSLSSPSLSEAAHMLLGNQGLAGVVARDGRGMGDSRGGVDGRNGKVEIGEGGVVDKEDDKSSVSTVEGNPVSSGNLEAGVRRPRIAAELPLPLRDRMMEALRLIGQSLEDVLVQVWMPVVQGSRKCLLTREQPFVVEPNNEQLWLYRNMTEGYEFPAERAEGKVLELPGRVFTGQQAEWTPNVQYYSSQEYLRVKEAQRCDIRGSLAVPVLDPVSRQCVAVIELVGRAEKIQYGPDVDIIARALQAVNLTCPVGLETPPLERSSWGRQAALAEIAEVLKGVCEAHKLPLAQTWVPTYRYGGRGDAKAQSHNAVQVNGGRGVRKVVLRIVDGDGPCYVGEARMWGFRRACLEHALEKGQGVPGKAMLTNLPVFDSDVKSFSKDEYPLGHYAKLFGLVSAVAIRLRSVHTGDEDFILEFFLPMDCVESEKQQQMLNSLSITMQRICQSLRTLSERELEEERRVAMAESIEMQAKAVKLEAKEVCNKEDFLAWRGGFNRHGGGVNGEETSPAFSQVMQQQHGVQQAARFVPQRSALQQFSHGVLLGRGRDDGLRIPESHVYPGYHSEQLPVEQGLGMGGFGCPGLGQDVASHRRRFERRRGTTEKTIGLNVLQQYFAGSLKDAAKSIGGKRHWVRGEGMGRGGGRARAWRSAVDCVVVSSLEEKVLDGSNGDDGQGRAQVDNGDMCRSNDGNSTSSGGSNPNVKAGYGSNGGHYCPGMSPLASGSMLTGGDADRGDDGGKRSVGTAFQGVGNAGKGSGAGKGQQASPLGRSGEQPVPGRGGAGRVSDLVRGATPRGWNESRVHGGGGALAALKGGDQHGSHGFSEDPVSSCNRANDGEEEVTGCGLESPGFGSSPASDCSSPSTGVNGTSNKKAWAGQEDGAAITVKVTHGLDTVRVKFSRNGSFVELKEEVRRRLKLVGQKFSLKYLDDDEEWMLLACDADLQEMRCAGAVGARVVYANPSADVVEVKGTWSRIAVSGVVGRIERGILSTARELSAKPFCATARLCVFWSSCVLDDEDGKRHRGLLGAERSADFSVLEGVAALRAGLQHQYGISTASFYLGTPTKSQNVVCTPSQ

SEQ ID NO: 541 - protein, 1262 aa, Physcomitrella patens
MELLRSNPRCGPRTRRTTECGGHGQQQATGATRVVVAGGLGGGSAGEAKFVMDETVLMDLMELDSLSEQLLGETWAGDNHGDYGSYLAYPASCNGGMFAAAGPPPVSQSAQMYSYGNGSMAASLQAFQQELMLQQVVESCQQSIPVASSSPPSLPLSSAPVSGISSYGAAVGSRLLSSSSPSPSGTARTMPGNQSLAGMITGDGRGVGDPRGGVGGRSGVAEIRESGVVDREEEKSSLSTVEGNPVSSGNLEAGVRGPRISAGFPLPLRDRMMQALRLIGRSLKDELVQVWMPVVQGTRKCLMTRDQPFTVEPRNEQLWVYRSMSESYEFPAERVEGKVLGLPGRVFIGQKVEWTPNVQYYSIQEYLRVKEAQRCDIRGSLAVPVLDPVSHQCVAVIELVGRAEKVQYGPDVDIIARALQAVNLTCPVGLETPPLERSSWGRQAALSEMADVLKAVCEAHRLPFAQTWVPTCSYGSRSDAKAQGNNAEQVNGRCSRSKVVLRTVDGDGPCYVSDSRMLGFRRACLEHVLEKGQGVPGKAMLTNLPVFDSDVKSFSKDEYPLGHYAKLFGLVSAVAIRLRSVHSGDEDFILEFFLPTDCVDSEKQQVMLNSLSITMQRICQSLRTLSEKELEEERREALAESMEMQAKAVKEEAKEVSNKEDLLAAYGFNRHPGGGNGCEETTQAFPQVLQHHGVQQAAARCAVQRPPLQQFSRGMPTGRGCEEGLRILESHVYPWHHHPEQMGLEHGLGTGGFGCSSLHQDVASHRRRFERRRGTTEKTIGLNVLQQYFAGSLKDAAKSIGVCPTTLKRICRQHGISRWPSRKINKVSRSLKKLQGVIDSVQGAEGALRINALTGDLSSAAVAAAAVNGHMNKDMAASSQGNLSVSWSTPSLNSLDVKEAHGKLGSAEPLLGPKEESRRRHDPCSPQKLLLSMLKPTLQFRPEDDRIVSSLEVNAMSGASGGHGRVQLDNGDICRSNDRSSVSNIGSNPNVKAAYGSNGGHCRPGMSPLASGGILSSADTDRGCEGGHGGNRSSGNACQDVGNAGKVNGGGKGQQASPLGRPLEHLVPGRGGPGRPGDFIKAATSRGWNESRVHGGGGAMAALKGVDQYALYGPVDDPVSSCNHANGGEDEVTGRPGLCSLDSPGFGSSPASDCSSPSSGVNGTSNKKAWRGREDSAAITVKVTYGLDTVRVKFAQNVSFVELKEEVGRRLKLAGQNFNLKYLDDDEEWMLLACDADLQESIDLMRVSGRHAIKLMICSNML

SEQ ID NO: 542 - protein, 1211 aa, Physcomitrella patens
MDETVLMDLMELDSLSEQLLGETWAGDNHGDYGSYLAYPASCNGGMFAAAGPPPVSQSAQMYSYGNGSMAASLQAFQQELMLQQVVESCQQSIPVASSSPPSLPLSSAPVSGISSYGAAVGSRLLSSSSPSPSGTARTMPGNQSLAGMITGDGRGVGDPRGGVGGRSGVAEIRESGVVDREEEKSSLSTVEGNPVSSGNLEAGVRGPRISAGFPLPLRDRMMQALRLIGRSLKDELVQVWMPVVQGTRKCLMTRDQPFTVEPRNEQLWVYRSMSESYEFPAERVEGKVLGLPGRVFIGQKVEWTPNVQYYSIQEYLRVKEAQRCDIRGSLAVPVLDPVSHQCVAVIELVGRAEKVQYGPDVDIIARALQAVNLTCPVGLETPPLERSSWGRQAALSEMADVLKAVCEAHRLPFAQTWVPTCSYGSRSDAKAQGNNAEQVNGRCSRSKVVLRTVDGDGPCYVSDSRMLGFRRACLEHVLEKGQGVPGKAMLTNLPVFDSDVKSFSKDEYPLGHYAKLFGLVSAVAIRLRSVHSGDEDFILEFFLPTDCVDSEKQQVMLNSLSITMQRICQSLRTLSEKELEEERREALAESMEMQAKAVKEEAKEVSNKEDLLAAYGFNRHPGGGNGCEETTQAFPQVLQHHGVQQAAARCAVQRPPLQQFSRGMPTGRGCEEGLRILESHVYPWHHHPEQMGLEHGLGTGGFGCSSLHQDVASHRRRFERRRGTTEKTIGLNVLQQYFAGSLKDAAKSIGVCPTTLKRICRQHGISRWPSRKINKVSRSLKKLQGVIDSVQGAEGALRINALTGDLSSAAVAAAAVNGHMNKDMAASSQGNLSVSWSTPSLNSLDVKEAHGKLGSAEPLLGPKEESRRRHDPCSPQKLLLSMLKPTLQFRPEDDRIVSSLEVNAMSGASGGHGRVQLDNGDICRSNDRSSVSNIGSNPNVKAAYGSNGGHCRPGMSPLASGGILSSADTDRGCEGGHGGNRSSGNACQDVGNAGKVNGGGKGQQASPLGRPLEHLVPGRGGPGRPGDFIKAATSRGWNESRVHGGGGAMAALKGVDQYALYGPVDDPVSSCNHANGGEDEVTGRPGLCSLDSPGFGSSPASDCSSPSSGVNGTSNKKAWRGREDSAAITVKVTYGLDTVRVKFAQNVSFVELKEEVGRRLKLAGQNFNLKYLDDDEEWMLLACDADLQESIDLMRVSGRHAIKLMICSNML

SEQ ID NO: 543 - protein, 1151 aa, Physcomitrella patens
MPPSKTEVAMGANSGEIGSKFVVDDSLLSDLMDLDPLSEQLGEESWMNGGSGSDNCDFNLTSYSVSSSENCYASISPSSPPTSHSSSIFSQTSEADLDALQLLQQVFDGSPSPFSPPLSPSPVGDGNITMLLADQNIITTSNAMEYTDPSEKCRIDTPFLAMPNEEEEDEAEEKSGLSEEEKVVEEGGTRKRTLARALSSSPVCLRDRLLQAVRYIGRFRMDVLVQIWMPQQTSSNPQKRILTTRDQPFILEQRNDKLLHFRNASESYEFAAEAGNSGLGLPGRVFVHQMPEWSPNVQIYNCQEYLRHLEAQRCDVRGSLALPVFEPTTLQCVAVIELVGCTEKIQFFSDVDIISRAVQAVHLSSVNSLETPVPERLSLGRHSVLNEIAEVLTAVCETHKLPLAQTWVPACRYGSMDIKVHQSGSKRMRSENGSFLSHSASSCPCNSEILRTGDGPCYMNDGRICGFRRACLEHSVETGQGVVGKAFETNQPSFDSDVKTHSKAEYPLAHYAKCFGLGAAVAIRLRSVRTGNDDFILEFFLPPTCVDSKEQQLLLNSLSITMQRTCRSLRTVTDKELEEERSRTGNGNVVVKIEAKEEPNDGGSVLYPQNPIGNQEGMLFTSSGDRDQDQATHYQIPQPSLLNQFSFQRNSNWQPSDSLHPGEPQHHASYIDPLGNHALGCSNTAQDAASQRRRLDRRRGTTEKTIGLSVLQQYFAGSLKDAAKSIGVCPTTLKRICRQHGISRWPSRKINKVSRSLKKLQGVIDSVQGADGALRINALTGDITTASMAVDASTDHIGSDGACAKSKWCVSWSTPALRNHELEEHKVRGDTLSVPEEEDRKKHDSCSPQSVLMSILSFPTAKSSRICQANKSRDGSPAEDGSPMIGHNSGGRTTRILSPRRNLTVGTGDAAVHDGITVHHNLPVARSQQGSPISGSYDDIVSSTSKAGSIKNELPESMTSSGCQTQAHNDANAHEAFEEVCIKKLNVEVPVSSSSHREDGDQERKVMGGSGTFNSDSPRFGSSTAQGTSDCSSPSSEGNPSLHKKTWPTHGDVVTIKVTHDDDTVRFKLACDKSYLDLRDEVNQRLKLTKVTFDLKYLDDDEEWMLLACDADLQECLDVMRASGRSAIKLMVRCNVSSRAGTTCVDDKSQS

SEQ ID NO: 544 - protein, 1233 aa, Physcomitrella patens
MEMPPPNEQRFQPTLPRWRTSELLPFSQQLSPGGPFSGVDSKFLIDDSVLTDLMDLDPLCDQNTEPWAIVGQDFGLPFASFSPGVFSPGNFSPSAMSPPASQVSQSSQLYAQVNTLMAVPGGQFSSGVLVQDGGLSPSSSRLLDLLDQPATSEGYLVAMTPGAGANFAEMPQIYITHGQGSNPHSNSQGAAVTERLNDLGNDRINYGNNCGVVSMRANQGGELAPSSRVGELQDENSQLIDPASFDCTNGAQNAQYDMITKSENSRKRLMTVGTKESLKDRMMQALRLIGRSCVDVLAQVWMPVRTTDNQTVLSTREQPFVLERKTDHMWTYRSISENYVFAVTGGFPGLPGRVYLQQVPEWTPNVQFYSDHEYLRVKHAMACDVKGTLAVPVFEAGSRNCLAVIELVMKAEKVQYAPEIDIICRALQAVNLSCSDGMELPALEFRTQGRRVALAEISEVLTAVCETHNLPLAQTWVPGSHHSLEKPSNNKKSRIESGGNSKSSGGSYSSSRVCLRTGDGPHYVKDSKMWGFRQACLEHFLEKGQGVPGKAFASNQPAFESDVKNYSKIKYPLGHYAQLFGLTAAVAIRLRSIHTGTDDFVLEFFLPVNCTSSNDQQVMLNSLSITMQRVCRSLRTVTDKEFADEVKAATAEEKADAESTLSKAMDPLEDQGSGGASAMGSSFSENATEGDHLQEKLAQDPQVASASSLQRSQSVASKNVQMEESSEHVEPMSNGQKQTAAREAGALRTFTSIAQNAANPNRKLDKRRGTTEKTIGLDVLQQYFAGSLKDAAKSIGVCPTTLKRICRQHGIPRWPSRKINKVSRSLKKLQGVIESVQGADGALQINALSGDIASAAVAAAAVTGVPAAKDADTPEGRPAASPSDGHLNKQDGLINGESNQTPMSNLDEEFSPRDSQPSRHPAVASNLSYARVGSKDAANLANTTDTRSSPTDHTWNRNSDESSEGAGRDSTTYGDTQNFVTVSSEQELKGAVRKLDRKEDASANLDTPLLCLPNGSSSRSQCGASDSSMSEFCRNADSGSGTGFYGGAICVESRVHGGARALAALRDSDLSSYGNPVACGRYPLEDSPREVTGGHRTGSSQHNGSDSSSPSSGAGGHPRKHWPAPAPEPEAVTVKATFGADTVRFKLLVKSSYLELRTEISGRLKVDDQGFDLKYLDDEEEWMLITCDADVKECIEVARTLGRHTVKLMVRENGSRNSSGNNSNISLQVMTTS

SEQ ID NO: 545 - protein, 1162 aa, Physcomitrella patens
MPPSEREVAMGISTGDIVSKFVVDDGLLSDFMDLDSLSDQLDEEESWMDGASGSSSCDFTLTPYSMASSDNCYASFSPPSPVTSHSSSLYSSQTPSAAGLDGLQLLQQVLDGAPSAFPPPLSPSPVGSGNIDMLLSDQNLSSMENVVDYNDLFEKSRVNSSFLAMPSEDDEDEAEEKSGLSEEEKVVGEGETRKRTLTRALSSPPMSFRDRLLQAVRYIGRLRMDVLVQVWMPVVQQTSSSSSKRVLITRDQPFVLEQKNDKLSNFRSASEDYEFAADAGITGMGLPGRVFVHQMPEWSPNVQMYNCQEYLRHVEAQRCDVRGSLALPIMDPVSSQCVAVIELVGCTEKIQFHSDVDIVSRAVQAVHLSTVNSLETPVPERLSQGRQAVLNEIAEVLTAVCETHKLPLAQTWVPTYRYGSMDIKVHQSGSKRMRSENGSGLSRNTSSSPCSGEILRTGDGPCYVSDGRIWGFRRACLEHSLEKGQGVAGKAFETNQPNFDSDVKIHCKTEYPLAHHAKCFGLGAAVAIRLRSIRTGNDDFILEFFLPSTCVESKEQQLLLNSLSITMQRTCRSLRTITDEEEKEELHIAGNGNVLVKAEAKEEPIDGDCVFHPRTPYGSQEGISLISSGAKGEEQATHCQLPHPSLISQLSLQRNSNWQSSYLLNPSESQQHASKSEDSDPLVNHVLGLDRLGCSNAAQVAASQRRKLDRRRGTTEKTIGLSVLQQYFAGSLKDAAKSIGVCPTTLKRICRQHGISRWPSRKINKVSRSLKKLQGVIDSVQGADGALRINALTGDITTASMAADNGSGHAGSDGSCAKSKWSVSWSTPAPRNRDLEDHKVRGGTLLLPKEEDRKKHDSCSPQSVLMSILSSPETKPSRHWHTNEKSAGVSAEGNDLAVGHDSGFRGASTLSPGSNLTIDTGLAVVCDAVTAHHDLLGARSQQSSPSSGSYDDIAPPTSKVDSRGSGLPESKTGSGCQNQVHDSASAEVAIKDVCKKNKSPEVGVSSSSLNEDQEQEREVMGGSGTSNSPRFGSSTAQGTSDCSSPSSAGNPSSHMKTWPAHSDVITMKVTYNEDTVRFKLSSDKSYLDLRDQVNRRLKLAGLKFDLKYLDDDEEWMLLACDADLQECLEVMRVSRRNAVKLMVRCNVSSSVETSCADDKTLS

SEQ ID NO: 546 - protein, 1030 aa, Physcomitrella patens
MLLSDQNLSSMENVVDYNDLFEKSRVNSSFLAMPSEDDEDEAEEKSGLSEEEKVVGEGETRKRTLTRALSSPPMSFRDRLLQAVRYIGRLRMDVLVQVWMPVVQQTSSSSSKRVLITRDQPFVLEQKNDKLSNFRSASEDYEFAADAGITGMGLPGRVFVHQMPEWSPNVQMYNCQEYLRHVEAQRCDVRGSLALPIMDPVSSQCVAVIELVGCTEKIQFHSDVDIVSRAVQAVHLSTVNSLETPVPERLSQGRQAVLNEIAEVLTAVCETHKLPLAQTWVPTYRYGSMDIKVHQSGSKRMRSENGSGLSRNTSSSPCSGEILRTGDGPCYVSDGRIWGFRRACLEHSLEKGQGVAGKAFETNQPNFDSDVKIHCKTEYPLAHHAKCFGLGAAVAIRLRSIRTGNDDFILEFFLPSTCVESKEQQLLLNSLSITMQRTCRSLRTITDEEEKEELHIAGNGNVLVKAEAKEEPIDGDCVFHPRTPYGSQEGISLISSGAKGEEQATHCQLPHPSLISQLSLQRNSNWQSSYLLNPSESQQHASKSEDSDPLVNHVLGLDRLGCSNAAQVAASQRRKLDRRRGTTEKTIGLSVLQQYFAGSLKDAAKSIGVCPTTLKRICRQHGISRWPSRKINKVSRSLKKLQGVIDSVQGADGALRINALTGDITTASMAADNGSGHAGSDGSCAKSKWSVSWSTPAPRNRDLEDHKVRGGTLLLPKEEDRKKHDSCSPQSVLMSILSSPETKPSRHWHTNEKSAGVSAEGNDLAVGHDSGFRGASTLSPGSNLTIDTGLAVVCDAVTAHHDLLGARSQQSSPSSGSYDDIAPPTSKVDSRGSGLPESKTGSGCQNQVHDSASAEVAIKDVCKKNKSPEVGVSSSSLNEDQEQEREVMGGSGTSNSPRFGSSTAQGTSDCSSPSSAGNPSSHMKTWPAHSDVITMKVTYNEDTVRFKLSSDKSYLDLRDQVNRRLKLAGLKFDLKYLDDDEEWMLLACDADLQECLEVMRVSRRNAVKLMVRCNVSSSVETSCADDKTLS

SEQ ID NO: 547 - protein, 1251 aa, Physcomitrella patens
MEIPPPNERFQPTMPRWRTSELLALSQQLSPGGQFPGSDSKFLIDDTLLSDLMDLDPLCDQSGEPWVAAGQDFSLPFAAFSPGQFSPGNFSPSAMSPQPQSQASPNSQLYAQVNSGMAVPGGHLSPREILVQDGGLTPSPSRLVDLLEQPSTSEGYLVAMSPGTSANFAEMSQIYLSNGSTANSHANLHSNSHGAMVNERVINLGNNRSNYGRNCLTVTNATMERNPEGESLLRQAELRDEYAGQPMDPAAFEYINATQDAQYDMVTKSETSKKRLVVTGGSLTLKERITQALRFIGRSCVDVLAQVWMPVRTADNQTVLSTREQPFVLERKTDRMWTYRSISENYVFAVTGGFPGLPGRVYLQQVPEWTPNVQFYSDHEYLRVKHAMACDVKGTLAVPVFEASSRNCLAVIELVMKAEKVQYAPEIDIICRALQAVNLSCTDGMELPALEFRTQGRRAALAEISEVLTAVCETHNLPLAQTWVPGSHHSVDKPSSNKKCRVESGTNSKSSGGSHSSNRVCLCTGDGPHYVKDSKMWGFRQACLEHYLEKGQGVPGKAFASNQPAFESDVKNYSKIEYPLGHYAQLFGLTAAVAIRLRSIHTGADDFVLEFFLPVKCISSDDQQVMLNSLSITMQRVCRSLRTVTDKELADELKAASAEESTEAESNPPKPVDPAEEQRNAAASGIELPPSENATENPTVQEKQPQQISQEIPALPLERSQSLVSEKAQVGESNDNVEPLQLFEKQPAIQVPGAARTFTSTAQKAANQNRRLDRRRGTTEKTIGLDVLQQYFAGSLKDAAKSIGVCPTTLKRICRQHGISRWPSRKINKVSRSLKKLQGVIESVQGADGTLRINAFSGDIASAAVAAAAVTSTVPAAKDTTTEDGRSAASPSEACHNQHDGISNGESNQTPLSVEDEDSSPHDIQRLRHPTGASNLSMARAEPKVPVNLANANGTRPSLPIDHTRDRNSDESSGGAEFGSTNHGGADQDFYAVSAEQESDGTGRKLDIKEVSAKDPPTLYIPNGSSNPSHSGGSDWDRSPNGSMSDFGRNTDSGSGTGFNGGAICVESRVHGGASALAALRDSDLSSYGNPCDYERYALDDSPREVTGAHRTGSSHHNGSDSSSPSSGAGGYARKHYWPVPVVEPEAVTVKATFRADTVRFKLLVGSGYLDLRNEISRRLKVDEHGFDLKYLDDEEEWMLITCDADVKECIDVAQTLGRHTVKLMVRQSGSWTSSGNNSNVSLQDMNCHAA

SEQ ID NO: 548 - protein, 1252 aa, Physcomitrella patens
MELPQASRACVPRWRPTTEFGGHGQQQQVVSQAMGVLAGLGGSAGESKFVMDEAVLTDLMELEPLHEQLLGESWAEGNYGDYGGYLALPASSHGGVFAGPVPALASLQAFSYANGSLAASVQAFQQELMLQQALESSQQQSIPGASSSQSSLAMSSAVVSGMSSYSAAVGGRSLSSPSLSEAAHMLLGNQGLAGVVARDGRGMGDSRGGVDGRNGKVEIGEGGVVDKEDDKSSVSTVEGNPVSSGNLEAGVRRPRIAAELPLPLRDRMMEALRLIGQSLEDVLVQVWMPVVQGSRKCLLTREQPFVVEPNNEQLWLYRNMTEGYEFPAERAEGKVLELPGRVFTGQQAEWTPNVQYYSSQEYLRVKEAQRCDIRGSLAVPVLDPVSRQCVAVIELVGRAEKIQYGPDVDIIARALQAVNLTCPVGLETPPLERSSWGRQAALAEIAEVLKGVCEAHKLPLAQTWVPTYRYGGRGDAKAQSHNAVQVNGGRGVRKVVLRIVDGDGPCYVGEARMWGFRRACLEHALEKGQGVPGKAMLTNLPVFDSDVKSFSKDEYPLGHYAKLFGLVSAVAIRLRSVHTGDEDFILEFFLPMDCVESEKQQQMLNSLSITMQRICQSLRTLSERELEEERRVAMAESIEMQAKAVKLEAKEVCNKEDFLAWRGGFNRHGGGVNGEETSPAFSQVMQQQHGVQQAARFVPQRSALQQFSHGVLLGRGRDDGLRIPESHVYPGYHSEQLPVEQGLGMGGFGCPGLGQDVASHRRRFERRRGTTEKTIGLNVLQQYFAGSLKDAAKSIGVCPTTLKRICRQHGISRWPSRKINKVSRSLKKLQGVIDSVQGAEGALRISALTGDLSSAAVAAAAVSGHMNKGLAASSPGNLSVSWSTLSPSCVEGKEAHAKVGSAESLLGPKEENRRRHDPCSSQKVLLSMLKPTLQFRPEDDRVVSSLEGKVLGGSNGDDGQGRAQVDNGDMCRSNDGNSTSSGGSNPNVKAGYGSNGGHYCPGMSPLASGSMLTGGDADRGDDGGKRSVGTAFQGVGNAGKGSGAGKGQQASPLGRSGEQPVPGRGGAGRVSDLVRGATPRGWNESRVHGGGGALAALKGGDQHGSHGFSEDPVSSCNRANDGEEEVTGCGLESPGFGSSPASDCSSPSTGVNGTSNKKAWAGQEDGAAITVKVTHGLDTVRVKFSRNGSFVELKEEVRRRLKLVGQKFSLKYLDDDEEWMLLACDADLQESIDLMRVSGRHAIKLMVCNSML

SEQ ID NO: 549 - protein, 877 aa, Raphidocelis subcapitata
MAAAEVKARLSRAIHGLTVQLATHGGGAACSDGPDGRGGALLQVWMPSQAPDGTTVLSAQGLPFAVAGVGDLLALFRCVSCRYRFSTDESKPALMGAIGRVYSSCEPEMCNDLQKYDKEVYLRVSEAQRCRVQSTLVMPVFDGVWGPDGGAAATAGGGGDGGGGGGGGAPHAPVAVLEVVQSGREVMFPEVMGWMRACLQEVNLSTRDLESLRLELALGSSDEFQPAEDAAAAAAAGAAAAGAAAAPSQPVPVPQPAAAAPRVSADGRSPGGSAASPGGRSAGAQRLVPEGEAAAALAAAVTAATAARRQARSGDSSAPGSDGRPRAAGEPSSGAAAAAGTGTGVRVKQEASSQPGGVGSGGSGSGSAAGLGGVPTPEELRGLSADAMLALLPAGGSDPDRAQRVLAAIAAAAVTSPAALEALQRWHLRQGGEQRGGGGGRAAAAGAAGGEEDGDEDIADVDGADSASSDGGGDDAGGAGPAAPRSASADAAARVAAAAVAAAAAQPLGAGRRLTYEDLQSQFGVGLKEAAVNLGICATTLKRACRRHGITRWPRRQIAKLNRALAQAGYSGSEPGAVERTANATTGLSQAQAAAAAAASAPIAVPGAGGSGAAAAAAAPAPASASAPSGAIYLAHPGGGPLPVVVAGGAPLYAHPHAHHHAHAGVQIAFAPGSYPPAQMTAVPDGRGGYVLTSAPAPPPVMLQGGAGSAGSSLSSALAQAAAAPEPGVAPAPAASYVLVQGQNGQQQLVMLAPQQQLQQQQQQQQPGAYAAMAPGHPHAHAHHVAYLQLAPAAPQHGHQQPAAAAGMGGLDGAGFLDLMDGDDDLIMPSGGVDALIRELAGATPPPGTAPVPIPGTAPGAPGGAGGGQGDLAGVWD

SEQ ID NO: 550 - protein, 1003 aa, Volvox carteri
  REGION 1..1003: note = f. nagariensis
MAHSSLGLLAGGSDLKQRLSKALLDVSGTLASVKSGALVQVWMPEHTHDGTIVLSCQGLPFAVAGVGDLLALFRCVSVRYRFSTDVMKPTLMGAIGRVYSTLEPEMSHNVQKYDKQVYLRVSEAQRCRVHSTLMVPVFGSDSRDTPLAVFELVQGDKDVTFPAVLSHLTASLQNVHLFTTDLETAAIAAGLRKWPMHIDMMPSAEHDSAGVGRLSPSRDEPRLMSNFQNMQAGAEEKEQAASSNVVSTEEKQSPNASKGDEAGSRACEWTSQSGAARLSVGNPIGQTCPAGQAPSSGLMATSGSGASRLMAGPAPAAPATMGPTLGICSNSGAAVGKPEAVAAQGFEVSTADGVGARRQSGTGPMEASNAQQFMSWLAQQNATGNNALGQLRTLLEQQQQRSKAEQSGGNLLGQQTASGTQPQSMDALAASMGASLGMVPPNMAASPTKGSVMQQHAAFDMAAATAATTAAATTTTTSDKQGNKLTRSGSVQRTLGAAADADDGDGEDISSGGEDDDSDDERPGGHRNNNRVGGGAGKRLRFEDLQAQFGLGLKEAANNLGICATTLKRACRRNGIKRWPRRQIAKLSKALNQMGYNGAPPPGLVQNAVVSAGASSGQAAVKPKPAKKPDAAALQQATQLLFQHQLGAAAAAAAAAGGGGMFTNLSTAGMVVGGQLQGIPQGLHGMYGVAGQPAQQQHQPPPQQAGMFSGPFMGPMGAIMAQHGGNVPSGVLGQGPQALLGAMGGIGGGLGAAIQMPVMGSLGGLQGSAMGPMQTAALGLQLQGAGGLQLQGAGSTGMPVHGHTGMLHPLLAGGSFNMHQALQQQQQFQQQLQAAHHQQQQQQQTSSLLQQQHAVLQQQMQIQQQVQQQQQQQQQQQQQLGPVALQQMGKPDAVSWLVQAQAQAAPQASLAANGMTTASSAMDISAPRISCGEAHSPFSALGMSPAMSGGNTELCGLAEIPEDFIQNLNSGGVSQFGQLLKSGTLGVGTMELMDLLGDDIAAR

SEQ ID NO: 551 - protein, 646 aa, Cannabis sativa
MPNFSPPNVCDELYQLVLNEIVEVLVSVCEIHRIPLAQTWASCHQQGHSGENYARCISSASLVSDLELLGFHQACSQQHHLFRNQGIVGAAFTGNKPCFTTDITALDKKEYLLSHHARMFGLRAALAIPLRSIYSGISSFGFVLELFLPKDCQDQEEQKQMSNSLSFLIQQACECNSLRVVVEKELKEDQVMLQTRDQTTVSTPEEGLKLWSANTTTYPVGDQSSGKRSSCFDHVVVEAQQHGREVSASLDSLTEEPGKEFRVTPHGFNLNHGDLPKGKVPIDFGQLQQCSVSKESSNESADSYYFCGHSSSGTRKVGEKRTKSTENISLSVLRQYFAGSLKDAAKCIGVCPTTLKRICRQHGITRWPSRKIKKVGHSLMKLQLMINSVEGADRAIQIGSFYSSIPQLNSPMIPENNDDSSSSINPSEHRNHQQLNSQSNSQLESGIYKYNHGLAMKPLSSMSSEVSALQLHSTTTFDGFNGDSLITEDSSLVLNRSCSGHGELLASSRTENQILHQTLPLLPEKNVGITSRDKFAFRVKANYGDKKIRFSLIPNCSYKELQLEIMRRFSLDDITMIDIKYLDDDRDWILLTCNADLQECFEIHSQSQNWKMRLCLQQASSNQKIEPSPFESSSSSHVSSTNYKSV

SEQ ID NO: 552 - protein, 637 aa, Humulus lupulus
MPTFKAVVDLRSSQNFSPPSVCDELYQAVLTEIVEVLVSVCKTHRIPLAQTWAPCHQQGHAGENYARCVSSASLVSDLELLGFHEACSQHHLFRGQGIVGAAFTTNKPCFATDTTSFDKTEYPLSHHARMFGLRAAVAIPLRSISAGSFFDFVLELFLPKDCQDPEEQKQISNSLSFVIQQACDCKSLRVIVEKELEEDRVMLPTGDQTVVSTPEVQSSGKESSWVDHMMEAQQQGRGVSASLDYLTEEPDEEFRVTPHGVNLNHGDLPKGKVSTDFGQLQKCSGSKESSNGGADSHSFDCHSSSGARKAGEKRTRSTENISLPVLRQYFAGSLKDAAKSIGVCPTTLKRICRQHGITRWPSRKIKKVGHSLMKLQLMIDSVEGADGAIQIGSFYSSIPQLNSPKFPGNNNDSSSSVNPSKQQYNQHLNSQSNSQLESGIYNHGLAMKPPSSMSSQASALHQHKTTTFDGFNGDSLITEDTSVILNGSCSSDRELLASSREENQIMDQTLPPLPENNVGIDSRNKSAFRVKVNFGDKKIRFSLIANSSFRELQLEIMKRFNLDDIAMIDIKYLDDDRDWILLTCNADLQECFELHSQSLNHKMRLCLQQTSSEQRIEASHFESSSSSHASGNHYRPV

SEQ ID NO: 553 - protein, 878 aa, Lotus japonicus
MEYGSLLVQQQQQQDCNSAYGSLSNLSSDCGSVTTAEADHHIIEELLVQGCWVEVSGVGVREGELQLQQDESSFVVGKRWWIGPAAAVAGSCNSSVKERLVIAVGYLKDYTRNSNVLIQIWVPLRRGILHDHDYHTNYLLSNNPPPQPEAAADHESVSLGFPMPAAPNSNLYSNVHVRFFRSHEYPRVQAQQYGSLALPVFERGTGTCLGVLEIVITNQTTINYNVSNALDQAVDFRSSQSFIPPAIKVYDELYQAAVNEIIEVMTSVCKTHNLPLALTWAPCIQQGKCGCGVSSENYMWCVSTVDSACFVGDLDILGFQEACSEYHLFRGQGIVGTAFTTSKPCFAIDITAFSKAEYPLAHHANMFGLHAAVAIPLRSVYTGSAADFVLEFFLPKDCHDSEEQKQLLNSLSMVVQQACRSLHVVLVEDEYTLPMPSHTSKEELEEEEITITNNHEQKLFVSPSSHESECSKESSWIAHMMEAQQKGKGVSVSLEYLEEPKEEFKVTTNWDSSTDHDQQAQVFSSDFGQMSSGFKASTVEGGDQESSYTFGSRRSSSGGRKSGEKRRTKAEKTISLQVLRQYFAGSLKDAAKSIGVCPTTLKRICRQHGITRWPSRKIKKVGHSLKKLQLVIDSVQGAEGAIQIGSFYASFPELSSSDFSASCRSDSSKKMHNYPDQNNTLYGHGDHGGVVTSLKSPPSACSQTFAGNQPCTIINNGDVLMTESPPVPEALLSRRDHCEEAELLNNASIQEDTKRFSRPKSQTLPPLSDSSGWNSLETGAFRVKATFADEKIRFSLQPIWGFSDLQLEIARRFNLNDVTNILLKYLDDDGEWVVLACDGDLEECKDIHRSSQSRTIRLSLFQASPLNLANTFRNSSPS

SEQ ID NO: 554 - protein, 933 aa, Medicago truncatula
MEYGGGLVADGGVFGPMVGGGGGDQADIIEELLGEGCWIEASENSLMAMQQTTPQSQYMSNNNNIPMGMGEGDHFNHHHHHHPHPHHQMECTAPAANHDDQQESGFVVGKRWWIGPRANPGPTTSVKERLVVAVGYLKEYTKNSSNNVLIQIWVPMRRRSALIHTQNHYLQQESSSAPVSVNPNMNVHVRFFRSHDYPRHQQQQQYGSLLALPVFERGSGTCLGVIEFVISNQTLINYRPQLDHLSNALEAVDFRSSHNMNIPQAVKVFEELYEAAVNEIMEVLASVCKTHNLPLALTWAPCLQQQQGGGKGSSGASGCGVSTMSCCISTVDSACYVGDMDVLGFQEACSEYHLFNGQGIVGTAFTTTKPCFAIDITAFSKSEYPLAHHANMFGLHAAVAIPLRSVYTGSAADFVLEFFLPKDCRDTEQQKQMLNSLSLVVQQACRSLHLHVVMDDNNNNNMNDNNSSADHDHDQFTFPTTNSYMPSSASEPLSQVDAVSGCSTKDTSSSCSWIAHMMEAQNKGKGVSVSLEYLQEPKEEFKVTTCNWDREREDNVFSEFGQVLQQQQHDQSSNSRASVVSVEAGEESPGACGRRSSSSSSGRKSGDKRRTKAEKTISLPVLRQYFAGSLKDAAKSIGVCPTTLKRICRQHGITRWPSRKIKKVGHSLKKLQLVIDSVQGAEGAIQIGSFYASFPELSNATANGGDGNDNSNNSFYNNNHGDGIVTSLKSPPSACSQTHAGNKLPMTTTTAINHHHVVMTENPTGAPLGVDHAFMHASNINIQDYHQLQEDLDTKQLLLHFNNNNQILPPRPTVAWNNNNSSSSTLLERGAFRVKATFADEKIRFSLQAMWGFRDLQLEIARRFNLTDMNNLVLKYLDDEGEWVVLSCDADLEECKDLHTSSHTRTIRLSLFQASPLNLPNTFRNSSSSSPSS

SEQ ID NO: 555 - protein, 967 aa, Parasponia andersonii
MEYGAMMPSNAYGTSFSDATMEVDFMDQLLLEGCWDPAVAAAATGLNFTQPAAPCSSAPRSLIETSHYMPSFESSNTSTAHLITTHHHQIYQDHQETEEGGSDHLQENHSSESNNNNFFMNEANEVGKRLWIGPRPNPGTGPCSSVKERLTLAIDYLKECTRDRDVLIQIWVPIRRGGRQILTTYDQPYSLDPNCKSLASYRMVSREYQFLCEEDSAESVGLPSQAFLGKLPEWTPDVRYFRSYEYPRINYAKQYNVRGSLALPIFERGNGTCLGVVEIVMTTQKVNYRPEIEYVCQALEAVDLRSFQNFSPPAVKVCDELYQAALSEIVEVLVSVCKIHRLPLALTWAPCHQQGKGGCRHSDENYTRCVSTVDLACFVSNLEILGFHEACSEHHLFRGQGIVGTAFTTNKPCFATDITAFSKTEYPLSHHARMFGLRAAVAIPLRSVYTSSSDFVLEFFLPKDCQDPEEQKQMLNSLSIVIQQACRSLHVVEKELEEEQIMLPNGDPAIVASSEGGLKLGTPTTATTTNTTTCPVGDQSSGKESSWVAHMMEAQQQGRGVSVSLDYLTEEPKEEFRVTTHWDNLNHGDLSNGQVFSDFGQLQQCSGSNGSIEGGIDSYSFGGRRSSGARKAGEKRRTKTEKTISLPVLRQYFAGSLKDAAKSIGVCPTTLKRICRQHGITRWPSRKIKKVGHSLRKLQLVIDSVQGAEGAIQIGSFYSSFPQLNSPKFQGNSNDSFSSISPSDHHHHHHHLNNQSNSQPESGFFIHGSAMKSSPSMSSQASGLQQSTTTFSCFNGDPLITEDPSVILKRACSSDEELFASNQDKANLLSRSQSYKALSDQNRILDQTLLPLPDNNERINLTDGFAFRVKANFGEKKIRFSLPPKCSFRDLQLEIMRRFALDDITMIDIKYLDDDREWVLLTCNADLQECLEIHRQSQNRTMRICLQQAPSDQLIEESPFGSSSSPC

SEQ ID NO: 556 - protein, 967 aa, Parasponia rigida
MEYGAMMPSNAYGTSFSDATMEVDFMDQLLLEGCWDPAVAAAATGLNFTQPAAPCSSAPRSLIETSHYMPSFESSNTSSAHLITTHHHQIYQDHQETEEGGSDHLQENHSSESNNNNFFMNEANEVGKRLWIGPRPNPGTGPCSSVKERLTLAIDYLKECTRDRDVLIQIWVPIRRGGRQILTTYDQPYSLDPNCKSLASYRMVSREYQFLCEEDSAESVGLPSQAFLGKLPEWTPDVRYFRSYEYPRINYAKQYNVRGSLALPIFERGNGTCLGVVEIVMTTQKVNYRPELEYVCQALEAVDLRSSQNFSPPAVKVCDELYQAALSEIVEVLVSVCKIHRLPLALTWAPCHQQGKGGCRHSDENYTRCVSTVDLACFVSNLEILGFHEACSEHHLFRGQGIVGTAFTTNKPCFATDITAFSKTEYPLSHHARMFGLRAAVAIPLRSVYTSSSDFVLEFFLPKDCQDPEEQKQMLNSLSIVIQQACRSLHVVEKELEEEQIMLPIGDPAIVASSEGGLKLGTPTTATTTNTTTCPVGDQSSGKESSWVAHMMEAQQQGRGVSVSLDYLTEEPKEEFRVTTHWDNLNHGDLSNGQVFSDFGQLQQCSGSNGSIEGGIDSYSFGGRRSSGARKAGEKRRTKTEKTISLPVLRQYFAGSLKDAAKSIGVCPTTLKRICRQHGITRWPSRKIKKVGHSLRKLQLVIDSVQGAEGAIQIGSFYSSFPQLNSPKFQGNSNDSFSSISPSDHHHHHHHLNNQSNSQPESGFFIHGSAMKSSPSMSSQASGLQQSTTTFSCFNGDPLITEDPSVILKRACSSDEELFASNQDKANLLSRSQSYKALSDQNRILDQTLLPLPDNNERINLTDGFAFRVKANFGEKKIRFSLPPKCSFRDLQLEIMRRFALDDITMIDIKYLDDDREWVLLTCNADLQECLEIHRQSQNRTMRICLQQAPSDQLIEESPFGSSSSPC

SEQ ID NO: 557 - protein, 967 aa, Parasponia rugosa
MEYGAMMPSNAYGTSFSDATMEVDFMDQLLLEGCWDPAVAAAATGLNFTQPAAPCSSAPRSLIETSHYMPSFESSNTSSAHLITTHHHQIYQDHQETEEGSSDHLQENHSSESNNNNFFMNEANEVGKRLWIGPRPNPGTGPCSSVKERLTLAIDYLKECTRDRDVLIQIWVPIRRGGRQILTTYDQPYSLDPNCKSLASYRMVSREYQFLCEEDSAESVGLPSQAFLGKLPEWTPDVRYFRSYEYPRINYAKQYNVRGSLALPIFERGNGTCLGVVEIVMTTQKVNYRPELEYVCQALEAVDLRSSQNFSPPAVKVCDELYQAALSEIVEVLVSVCKIHRLPLALTWAPCHQQGKGGCRHSDENYTRCVSTVDLACFVSNLEILGFHEACSEHHLFRGQGIVGTAFTTNKPCFATDITAFSKTEYPLSHHARMFGLRAAVAIPLRSVYTSSSDFVLEFFLPKDCQDPEEQKQMLNSLSIVIQQACRSLHVVEKELEEEQIMLPIGDPAIVASSEGGLKLGTPTTATTTNTTTCPVGDQSSGKESSWVAHMMEAQQQGRGVSVSLDYLTEEPKEEFRVTTHWDNLNHGDLSNGQVFSDFGQLQQCSGSNGSIEGGIDSYSFGGRRSSGARKAGEKRRTKTEKTISLPVLRQYFAGSLKDAAKSIGVCPTTLKRICRQHGITRWPSRKIKKVGHSLRKLQLVIDSVQGAEGAIQIGSFYSSFPQLNSPKFQGNSNDSFSSISPSDHHHHHHHLNNQSNSQPESGFFIHGSAMKSSPSMSSQASGLQQSTTTFSCFNGDPLITEDPSVILKRACSSDEELFASNQDKANLLSRSQSYKALSDQNRILDQTLLPLPDNNKRINLTDGFAFRVKANFGEKKIRFSLPPKCSFRDLQLEIMRRFALDDITMIDIKYLDDDREWVLLTCNADLQECLEIHRQSQNRTMRICLQQAPSDQLIEESPFGSSSSPC

SEQ ID NO: 558 - protein, 674 aa, Trema levigata
MPITLQAVDLRSSQNFSPPAVKVCDELYQAALSEIVEVLVSVCKIHRLPLALTWAPCHQQGKGGCRHSDENYARCVSTVDSACLVSDLEILGFHEACSEHHLFRGQGIVGTAFTTNKPCFATDITAFSKTEYPLSHHARMFGLRAAVAIPLRSVYTGSSDFVLEFFLPKDCQDPEEQKQMLNSLSIVIKQACRSLHVVVEKELEEEQVMLPIGDPTIVASSEGGLKLGTTTTTTATNTTTCPVGDQSSGKESSSVAHMMEAQQQGRGVSVSLDYLTEEPKEEFRGTTHWDNLNHGDLSNGQVFSDFGQLQHCSGSKGSIEGGIDSYSFGGRRSSGARKAGEKRRTKTEKTISLPVLRQHFAGSLKDAAKSIGVCPTTLKRICRQHGITRWPSRKIKKVGHSLRKLQLVIDSVQGAEGAIQIGSFYSSFPQLNSPKFQGNSNDSFSSISPSDHHHHHHHLNNQSNSQPESGFFIHGSAMKSSPSMSSQASGLQQSTTTSSGFNVDPLITEDPSVILKRAWSSDGELFASNQDEANLLSRSQSYKALSDQNRILDQTLPPLPDNNERINSRDGFAFRVKANFGEKKIRFSLPPNCSFRDLQLEIMRRFALDDITMIDSKYLDDDREWVLLTCNADLQECLEIHRQSQNRTIRICLQQAPSDQLIEESPFGSSSSPC

SEQ ID NO: 559 - protein, 640 aa, Trema orientalis
MPITLQAVDLRSSQNFSPPAVKVCDELYQAALSEIVEVLVSVCKIHRLPLALTWAPCHQQGKGGCRHSDENYARCVSTVDSACLVSDLEILGFHEACSEHHLFRGQGIVGIAFTTNKPCFANNITAFSKTEYPLSHHARMFGLRAAVAIPLRIVYTGSSDFVLEFFLPKDCQDPEEQKQMLNSLSIVIQQACRSLHVVVEKELEEEQFMLPVGDPTIVASSEGGLKRGTTTTTATTNTTTCPVGDQSSGKESSWVSHMMEAQQQGRGVSVSLDYLTEEPKEEFRVTTHWDNLNHGDLSNGQVFSDFGQLQQCSGSKGSMEGGIDSYSFGGRRSSGARKAGEKRRTKTEKTISLPVLRQYFAGSLKDAAKSIGVCPTTLKRICRQHGITRWPSRKIKKVGHSLRKLQLVIDSVQGAEGAIQIGSFCSSFPQLNSQGNSNDSFSSISPSDHHHHHHHHHLNNQSNSQPESGFFIHGSAMKSSPSMSSQASGLQQSTTFSGFNGDPLITEDHSVILNRACSSDGELFASNQDEANLLSRSQSYKALSDQNRILDQTLPPLPDNNERINSRDGFAFRVKANFGEKKIRFSLPPNCSFRDLQLEIMRRFALDDITMIDIKYLDDDREWVLLTCNADLQECLEIHR

SEQ ID NO: 560 - protein, 675 aa, Trema tomentosa
MPITLQAVDLRSSQNFSPPAVKVCDELYQAALSEIVDVLVSVCKIHRLPLALTWAPCHQQGKGGCRHSDENYARCVSTVDSACLVSDLEILGFHEACSEHHLFRGQGIVGTAFTTNKPCFATDITAFSKTEYPLSHHARMFGLRAAVAIPLRSVYTGSSDFVLEFFLPKDCQDPEEQKQMLNSLSIVIQQACRSLYVVVGKELEEEQFMLPVGDPTIVASSEGGLKRGTTTTTTTTNTTTCPVGDQSSGKESSWVSHMMEAQQQGRGVSVSLDYLTEEPKEEFRVTTHWDNLNHGDLSNGQVFSDFGQLQQCSGSKGSIEGGIDSYSFGGRRSSGARKAGEKRRTKTEKTISLPVLRQYFAGSLKDAAKSIGSCPTTLKRICRQHGITRWPSRKIKKVGHSLRKLQLVIDSVQGAEGAIQIGSFYSSFPQLNSPKFQGNNNDSFPSISPSDHHHHHHHHHLYNQSNSQPESGFFIHGSAMKSSPSMSSQASGLQQSTTFSGFNGDPLITEDHSVILKRACSSDGELFASNQDEANLLSRSQSYKALSDQNRILDQTLPPLPDNNERINSRDGFAFRVKANFGEKKIRFSLPPNCSFRDLQLEIMRRFALDDITMIDIKYLDDDREWVLLTCNADLQECLEIHRQSQNCTMRICLQQAPSDQLIEESPFGSSGSPC

SEQ ID NO: 561 - protein, 939 aa, Ziziphus jujuba
MEYYGAMLPNSTYGNFPNTTSTTTTNAEEDFMDELLFEGCWLESSSGFNFMQPFSSNPHPLVVDPWHYLPSFESNSALSNMNPHHQIYQQDHTADQGSLTENHHENYNCFVIESSSNSRSSGNGNGGHIGGSRLWIGPRAYPNPSSSVKERLMLAIGHLKECTKHMDVLIQIWVPVRKGGKQMLTTYDHPYYLNTNCKSLENYQLLTEEDSTESVRLPHRTFLGKLPEWKPDVRFFQSYEYPRVNYGQQHDVRGSLAVPIFERGSGTCLGVIEIVMTTQMVNYRPEEYVFQALEAVDLRSSQNFIPPNIEACDELYQAALSEIVEVLTSVCKTNRLPLALTWAPCVQQGKGGCRHSDVNYARCVSTVDSACLVIDLEILGFHEACSKHHLFRGQGIVGTAFSTSKTCFATDITAFSKTEYPLSHYARMFGVHAAVAIPLRTVYTGSSDFVLEFFLPQDCHDPEEQKQMLNSLPIVIRQACRSLYVVDDKEPEEVMQPIRETIVLSDLRLGKEESLNLGPPSEETSEKESSWIAHMEAQQQGRCLSVLLDYQMEEPKEELKGTTHWDSNQGGLPNGQVFTDFRQLKQSSGHKVSVEGGGNSYSFGGHCSSGGRKAGRRRHTKTEKAISLQVLQQYFAGSLKDAAKSIGVCPTTLKRICRQHGITRWPSRKIKKVGHSLRKLQLVIDSVPGAEGAIQIGSFYPTFQELSFPKFQESDPFTSMKSSNQSKQLNSQSESGLFSQGGTTKSPSALCSQTSGLSVCAAEAKQHITNINGISCTDALMAKDPVGMLKRDCSDGKLLACNLEETKILPRSQSYKALSKNQTLESLHPMLGSSGWNFCDGGALRVEAYFGDEKIRFTLQSNHSFGDLQLEIARRFNLDDISTIDIKYLDDDHEWVLLTCNADLEECMEIYKSSQSHTLQLSLQRAPFPNQGSSFGSSS

SEQ ID NO: 562 - protein, 947 aa, Vitis vinifera
MEDGSFTPNSVFGAPSDSAMDLNFMDELLFEGCWLETTDGFSFLQPGASTSSALNDSSHHSLTFENPNTPEKSYGDDGQRSSLPENPPPFYPQAEGLVGTQSDNWKTFEAATASGQSESFLVERTELNRRLWIGPSANPGPVSSVKNRLILAIRNLREFTKERDVLIQIWVPIERGGKNVLTTNDQPFSLDPDCQSLANYRNVSENYHFPAEEDSKEQVGLPGRVFLGKVPEWTPDVRFFKSEEYPRINYAQRYNVRGSLALPVFERGSGVCLGVIEIVTTTQKINYRPELENVCKALEAVDLRSSEVLIPPVKACNELYQAALPEILKVLARVCRTHRLPLAQTWAPCIQQGKGGCRHSDKNYALFLSTVDHAYYVTDPKFKGFNEACFDHHLFRGQGVVGRALTTNQPCFESDITAFSKTEYPLSHHARMFGLRAAVAIRLKSIYNGSADFILEFFLPTDCQETEEQKQVLNSLSIVIQQTCQIFRVVTEKDLEKESILPVGEILFASDERVKQEGSVKLLSPPIKEPSREESSWIAHMMEAQKKGKGVSVSLEYQKEEPEEEFKVTTNWDNTEVELHHGQVFSEFGQPQQNSGAKGSVEGGGDSSFGGQHSSGSRKAREKRRTKTEKTISLQVLSQYFAGSLKDAAKSIGVCPTTLKRICRQHGITRWPSRKIKKVGHSLRKLQLVIDSVQGTQGAIQIGSFYTNFPELSSPNVPGTVPFSSSKMTDDSKQLNPQSEVLFSPGVTTSKSPSSSCSQSSSSSFCCSTGAKQQSTTVNASVSGDVLMAEDPVLLKRTRSDAELHVSNPDEPKLLVRSQSHKSFGEHPCVETLPPLPKSNSRALRDGGGFRIKATFGEENVRFSLQLNWSFKDLQQEIARRFGIDNMNSIDLKYLDDDCEWVLLTCDADLEECIDVYRSCQSRKIKLSLHHSSRLKLKSSAFSSGPS

SEQ ID NO: 563 - protein, 786 aa, Vigna unguiculata
MEYGGFSDIFAPETEFMDELFVEGCWVEARVGCGTEGSKWNRSMESNEAHIIFEEESEAESLMVGKRWWIGPRGNPGPSSSVKERLVVAVGYLKEYANNSNMVIQVWVPARRGCEAGIHHHQDYPYTLDYTNSNNGDATTPFPFQEEWLSHHCPPNIRFLRTHDYSRLHHYDLRPGSLALPVFQRGTGICLGVIDILMPNNVNQDLHGLQVQNMIPPAMTVKGFDDLYQGALNEIVQVLRCVCKAHELPLALTWAPCIQQGKTGCGHSNDENYVSTVDPASFVGDVDVLGFVEACSDYHLLGGQGVVGTAFTTAKPCFANDITAFTKAEYPLAHHANMFGLHAALAIPLRSVSADFVLEFFLPKDCHDTQHQKQMLHSLSMLLQQACRTLHVVLDKEEELVSHHHHHDTNEMESSSWIAHMMEAQQKGKGVSVSLEYLQEPKQEFKVTTNCNEQVFSDLEGTAGAAVVGRRGGRKSGDKRRTKAEKTISLPVLRQYFAGSLKDAAKSIGVCPTTLKRICRQHGITRWPSRKIKKVGHSLRKLQLVIDSVQGAEGAIQIGSFYTSFPELSSANGVSESPTINSDNSKFYSENGLFNQGVTSTSPFKSPTSSCSQTCNPSLKQSTTLINSNNNNNPDIILMSDKQSLVGASVQVHHPPIPIPISIPIQSLDALPPLPQTSSVRNMGGGTFRVKATFGDEKIRFSLQPNWGFRDLQMEIARRFNLKETSKIQVKYLDDAQEWVLLTCDADLEECKDINRSSQSRTVRLFLFHASPLNHSTNAFGSTSPT

SEQ ID NO: 564 - protein, 841 aa, Solanum lycopersicum; identical to SEQ ID NO: 179

SEQ ID NO: 565 - protein, 677 aa, Segretia sp.
MIVTTQLNKIFTFSCSFTFFPCTQIYSVSNFSCSSSTQIKNTNRYFSVLFSQTGKPFSKTPTAIAFIARTCDELYQAALNEIVEVLTSVCKSHRLPLALTWAPCVQHGKGGCRHSDENYASCVSTVSSACLVIDLDILGFHEACSEHHLFRGQGIVGTAFTTCKPCFATDITAFSKTEYPLSHHARMFGFHAAVAIPLRSVYTGSSDFVLEFFLPTDCQDPEEQKQILNSLSIVIQQACRSLRVVDKEVEEVMGHVRETIVPSDVRNGKLEESQKFGSFPTEETSLKESSWIAHMMEAQQQVKCVSVSLDYQSEEPKEEFRVTTHWDNHQGGLANGQVFSDFVQLQQSSGPKVSVEGGGDSYSFGGPRSSGGRKAGEKRPTKTEKTISLQVLRQYFAGSLKAAAKSIGVCPTTLKRICRQHGITRWPSRKIKKVGHSLRKLQLVIDSVQGAEGAIQIGSFYSSFPELSSPKFPGAGPFSSMKSSDHSKQLNGPSVCAVGAQQHTANLNAMSSANASMAEDHVGMLKRACSDAELLACNLEEAKIMPKSQSYKSLSENRILETLPPLPGNCGRSFRDGGAFRVKANFGDEKIRFSLHPNCSFRDLQLEITRRFNLDDISTIDIKYMDDDCEWVLLTCNSDLEECMEIYKSSQSRTIRISLQRAPYPNQRSSFGSSSPA

SEQ ID NO: 566 - protein, 951 aa, Ricinus communis
MDDDGASKPDSTSGSFSGAAMDLDFMDELLYDGCWLETTDGFSYPQTGSSTSTMTDSRSFPLIESSSSLASTNPHQQIHQEATEDNVPENPSTPLCNLNVKELTETQSQHCSVKNTTSLVQSEGFLNEGSELSKSLWIGPKADPGPSSSVKQRLMDAIKHLKQYTKDSEVLVQIWVPTKKEGKRVLTTFDQPCFLSLNSESLANYRYVSETYHFSVEGDSKDFLGLPGRVFLRKLPESTPDVRFFRREEYPRKSYAKQYNISGSLAVPVFERGTGTCLGVVEVVTTSRNINYRSELETICKALEAFDLRSSHDFCPPSVKACKEFCQSAVPEISEILGSVCKKHKLPLALTWARCFQQGKGGCRHFDEKFANCISTVDSACCVADRELYAFHIACSELYLSLGQGIVGKAFTTNKQCFATDITSFSQTDYPLSHHAKVLDLHAAVAIPLRSAYTGSADFVLELFLPKDCRDIEEQKAMWDLVPTAIQQACQNLHVVMEKELEEDISWQIPVALDGRHNKQVTHNIASSLKEPFAEGSSWIAQMVEAQRKGKNVCVSWDSPKEPKEEFKVATHWGDALEELYHKQVLTGTGLLQQDAATKDSITDGCSNPFAGQHSSGNRKAGEKRRTKTEKTISLEVLRQYFAGSLKDAAKSIGVCPTTLKRICRQHGITRWPSRKLKKVGHSLKKLQLVIDSVQGAEGAIQIGSFYTTFPELTSPNYGGNGPFTSLKMNDDSKPVNFQPENGFINAGTTASKSPSSSCSQSSGSSICCSTGEKHKITNNALNTGDGLTVENPSGVLKRTRSDAELHALYRPESKPLARSQSHKLLADHPSIDTLPPFPKGSSQSLRDSGTFRVKANFGEDKVRFSLQPNWDFKDLQQELAKRFGIHEGCRTDLKYLDDDHEWVLLTCDADLEECKDIYRVSQNHTIKISLHQASQPLRQLGGDKEGASHE

SEQ ID NO: 567 - protein, 952 aa, Purshia sp.
MDYGGLMSNPSYGTLSDTTMEVDFMEELLFEGCWLESNSGHNLLQQQHQQPTGPPVSRALTDHPSHYFPPYESNPTAAHLSITPHQHQQIYQEDTDGSYPESHSSFVVEGNTEAGRRLWIGPRANPGPSSSVKERLMLAIGYLKECTKGRDVLIQIWVPIKRGGKQYLTTHDQPFTLDPNCKSLAGYRNVSKDYQLITDEDSAESVGLPGRAFLGKLPEWTPDVRFFRSYEYPRIEYAQQYDVRGSLALPIFERGSGTCLGVVEIVMTTQKVNYRPELEYVCQALESNLIYHIDFQAVDLRSSQNFCPPCVKVPLLQTCDELYQAALAEIVEVLTSVCKTHRLPLAQTWAPCVQQGKGGCRHSDENYAHCVSTVDVACFVADLDILGFHDACSEHHLFRGQGIVGTAFTTNKPCFATDIKAFSKTEYPLSHHARMFGLHAAVAIPFRSVYTGPADFVLEFFLPKDCQDHEEQKLMLNSLCIVIQQACRSLHVDVDKELEEEVMFPVRESVVASDVGLHKEETQKLISSPTEEPSAKESSWISHMIEAQQKGKGVSVSLDYQTEEPKEEFKVTTHWDNTQGSLHNGQVFSEFGQLHQSSGPHGNVEGGADSYSFGGRRTSGGRKAGEKRRTKTEKTISLPVLRQYFAGSLKDAAKSIGSNAVCPTTLKRICRQHGITRWPSRKIKKVGHSLKKLQLVIDSVQGAEGAIHIGSFYSSFPELNSPKFPGSGQYSSLNMSDHSKQVNPQHESGLFSHGTTTKSPSSSCSQTSGPSVCVPGAHQHPVTINALSSGDAFMTEDPVGVLKRACGDAEFHASFQEETKLIHRSQSHKSFSDNLTYENLPPLPGSSSRNSRDGGLYRVKATFRDEKIRFSMLPNCSFRDLQLEIARRFNLDDISRIEIKYLDDDREWVLLQCDADLEECMEIYSSSPGRTVRLCLQQAFYPNLGSSYGNSS

SEQ ID NO: 568 - protein, 822 aa, Phaseolus vulgaris; identical to SEQ ID NO: 145

SEQ ID NO: 569 - protein, 967 aa, Parasponia rugosa; identical to SEQ ID NO: 141

SEQ ID NO: 570 - protein, 963 aa, Mimosa pudica
MEYGAALLHNNSAFETLSDSTTTSVSEVGDFIDDLFANGCWLETTGHGGSSYNLTNPTSLINDPNLHNYWMTSSDPNHPHHQHQQIYQQDQSEVSNFSLFQSESFVVANTEVGKRWWIGPKANPGPSSSVKERLVLAVGYLREYTKNTNVILQIWVPTRREDDPSCNNKNLENYYRNVSKVYNHHHQLAGEEESAEDQCRVFLGKLPDHHQHQWAPPASVRFFKSHEYVAYVNNFAPHVHHHHNQQHYDMLRGSLALPVFERGSGTCLGIVEIVIPNHQNNIDFHPQIDNVCHSLQVLQTVDFNKGACQNLISPAVKVQVYDELYLAALNEIVEVLTSVCKTHNLPLALTWAPCAQQGKAGLCPNDNFVGCLSTVDSACYVADLDLLGFQEACSQYHLLRGQGNIVGTAFTTTKPCFATDITAFSKTEYPLSHHAAMFGLHAAVAIPLRSAYTASQADFVLEFFLPKNCHDGEEQKQMLNLLCIVVQQACRSLHVAMDKQMQEVEEDEDFTFTVGDMFAAAAATKVGGGGGGGAHHHKEETLEFGSCNLEDGSSSKESSWIAHMMEAQTQHKGKGVSVSLEYLEEPKQEFKVTTNWGFCNNSNSNNGQAFSDYGQVQVNSSSAAASRGMSVEGGGESYAFRGGAGRRSSSGGRKSGEKRRTKAEKTISLPVLRQYFAGSLKDAAKSIGVCPTTLKRICRQHGITRWPSRKIKKVGHSLRKLQLVIDSVQGAEGAIQIGSFYSSFPELSSTTNLSPTTTGPSQSSNISEDHSKIQHNNPHHQAALYNHHGGTTLKSPPSCCSQTSTIINAAVSGGGDILMAENPEASLMMMRTQHNLHEDMKHPSVVEVLAQPLQENNASVGGGGFRVKATFGDEKIRFSLHPSWGFRELQLEIARRFNLEDVSNIGLKYLDEEGEWVLLTCDADLEESKDTYRSSKSRTMRFALFQTSPLNLANTTFGSNSSS

SEQ ID NO: 571 - protein, 930 aa, Manihot esculenta; identical to SEQ ID NO: 105

SEQ ID NO: 572 - protein, 933 aa, Medicago truncatula; identical to SEQ ID NO: 554

SEQ ID NO: 573 - protein, 847 aa, Lupinus angustifolius; identical to SEQ ID NO: 94

SEQ ID NO: 574 - protein, 409 aa, Lotus japonicus
MEYGSLLVQQQQQQDCNSAYGSLSNLSSDCGSVTTAEADHHIIEELLVQGCWVEVSGVGVREGELQLQQDESSFVVGKRWWIGPAAAVAGSCNSSVKERLVIAVGYLKDYTRNSNVLIQIWVPLRRGILHDHDYHTNYLLSNNPPPQPEAAADHESVSLGFPMPAAPNSNLYSNVHVRFFRSHEYPRVQAQQYGSLALPVFERGTGTCLGVLEIVITNQTTINYNVSNALDQAVDFRSSQSFIPPAIKVVYDELYQAAVNEIIEVMTSVCKTHNLPLALTWAPCIQQGKCGCGVSSENYMWCVSTVDSACFVGDLDILGFQEACSEYHLFRGQGIVGTAFTTSKPCFAIDITAFSKAEYPLAHHANMFGLHAAVAIPLRSVYTGSAADFVLEFFLPKDCHDSEEQKQLL

SEQ ID NO: 575 - protein, 583 aa, unidentified; identical to SEQ ID NO: 60
  REGION 1..583: note = Glycine max

SEQ ID NO: 576 - protein, 936 aa, Dryas drummondii
MDYGGLMPNPSYGTLSDTTMEVDFMDELLFQGCWLESNPGLNLLQQQHQQPAGPPVSRALTDHPSHYFLPYESNPTAAHLSITPHQHQQIYQEDTDGSYPESHSSFVVEGNTEAGRRLWIGPRANPGPSSSVKERLMLAIGYLKECTKGRDVLIQIWVPIKRGGRQYLTTHDQPFSLDPNCKSLAGYRNVSKDYQFITDEDSAESVGLPGRAFLEKLPEWTPDVRFFRSYEYPRIEYAQQYDVRGSLALPIFERGSGTCLGVVEIVMTTQKVNYRPELEYVCQALEAVDLRSSQNFCPPCVKTCDELYQAALAEIVEVLTSVCKTHRLPLAQTWAPCVQQGKGGCRHSDENYAHCVSTVDVACFVADLDILGFHDACSEHHLFRGQGIVGTAFTTNKPCFATDIKAFSKTEYPLSHHARMFGLHAAVAIPFRSVYTGPADFVLEFFLPKDCQDHEEQKQMLNSLCIVIQQACRSLHVDVDKELEEEVMFPVRESVVASDMGLHKEETQKLISSPTEEPSAKESSWIAHMIEAQQKGKGVSVSLDYQTEEPKEEFKVTTHWDNTQGSLHNGQVFSEFGQLHQSCGPNGNVEGGADSYSFGGRRTSGGRKAGEKRRTKTEKTISLPVLRQYFAGSLKDAAKSIGVCPTTLKRICRQHGITRWPSRKIKKVGHSLKKLQLVIDSVQGAEGAIHIGSFYSSFPELNSPKFPGSGQYSSLNMSDHSKQVNPQHENGLFSHGTTTKSPSSSCSQTSGPSVCVPGAHQHPVTINALSSGDAFMTEDPVGVLKRACGDASLHASFQEETKLIHRSQSHKSFSDNLTYENLPPLAGSSSRNSRDGGLYRVKATFRDEKIRFSMLPNSSFRDLQLEIARRFNLDDVSRIEIKYLDDDREWVLLQCDADLEECMEIYSSSPGRTVRLCLQQAFYPNLASSYGNSSPS

SEQ ID NO: 577 - protein, 929 aa, Discaria sp.
MEYSGAMVPNSTYGNFPNSESDFMEELLFEGCWLESSSGFNFMQSTSNPRSLLLDPSHYMPSFDSSALSQRRQIYNEDDDDNDEQQESSKRVWIGPRAYPNPSSSVKERLMMAVGYLKDCTRDRDVLIQIWVPIRRGGRQMLTTCNQPYSLNPDCKSLANYRAVSSGYHLLTEEDSGESVGLPGRTFLGKLPDWTPDVRFFRSYEYPRVSYAQQYDVRGSLALPIFERGSGSCLGVVEIVMTTQKVNYRPELEYVCQALENIDLSVMCYPSLMFWYIHLQAVDLRSSQNFIPPNIKVCDELYQAALSEIVEVLTSVCKTHRLPLALTWAPCVQQGKGGCRHSDENYARCVSTVDSACLVIDLDIMGFHEACSEHHLFRGQGIVGTAFSTNKPCFATDITAFSKTEYPLSHHARMFGLHAAVAIPLRSVYTGSSDFVLEFFLPKDCHDPEEQKQMLNSLSIVIQQACRSLYVVVDKEPEEAMLPIRETIIPSDVRLGKEESQKLGSPSEETSQKESSWIAHMMEAQQQGKCLSVSLDYQMEEPKEEFRVTTHWDSNQGGLPNGQVFSDFGQLQQSSGPKVSVEGGGDSYSFGGRRSSGGRKAGEKRRTKSEKTISLQVLRQYFAGSLKDAAKSIGAVCPTTLKRICRQHGITRWPSRKIKKVGHSLRKLQLVIDSVQGAEGAIQIGSFYSSFPELSSPKFPGSDPFSSMKSSDQSKQLNSQTESGLFSQGGTMKSPSSSCSQTSGPSVCAAGVQQHITNINGMSSADALMAEDPVGMLKRACSDAELLACNLEETKIMPRSLSYKALSENRTLESLPPLPGSSGWNFRDGGALRVKANFGDEKIRFSLQSNCSFGDLQLEIARRFNLDDISNIDIKYLDDDREWVLLTCNADLEECMEIYKSSQSRTLRLSLQRAPYPNLGSSFGSSSPS

SEQ ID NO: 578 - protein, 868 aa, Datisca glomerata
MEYGALTVNSTYGNYTETTMELDFMDELLQGRWMDSSNGTNLLQSVSSVRALNNDSSNYVTPHEINTNHLMINPNHHVYEEDQANHETFLVEEVDQSSSRKWWISPRVYPEPSSCVKERLTLALRYLKDCLTNRDLLIQMWMPVRRGDKLVLTTHDQPYLLEPSCVSLANYRKVLSGYEFAAEEEGEESVGLAGRAYVGKLPEWTPDVRYFKRHEYPLIRYAEEYNVRGSLALPVFERGSGACLGVVEIVTTTQRVNYRPELDFITQALESVDLRSFQNFIPPIVKTCDELYQAALTEILEVVTSVCKTHRLPLALTWAPCSQQGKGGCRHSDQTYTRCVSTVDSACFVSDLETTGFHEACAEHHLFRGQGIVGTAFTTKKPCFAVDVTAFSKTEYPLSHHARMFGLVAAVAIPLRSVYTGPAEFVLEFFLPKECRNNDEQKRMLNSLSIVIQQSCRSLHVVTDNELEEEITEKAKPGPSTLEGDHHCTKDQSSWIAHMMEAQEKGKGVSLSLQYQTDEAEEEREGFRVTSYWDATQGGGLTNGEVITEFGELQQSSGLKSGDEGGGDSYSFGSRRGGRKAGEKRRTKAEKTISLSVLRQYFAGSLKDAAKSIGVCPTTLKRICRQHGITRWPSRKIKKVSHSLRKLQLVIDSVQGAEGSIQISSFYKSFPELGSTNVDVNDQFSSLKINYQNQHQAESGLFSHGAPAKSPASSSSQNSIPTRPNHHHMIANVNAFSGGDFLITEDPVGVMNRGSSEEPFGELMTNNNGCFKVKANFVDKKIRFILQPSWGFRDLQLEIGRRFNLEEMRGVEIKYLDDDHELVLMTCDADLEECKEIYSSSQNNTIVLSLSWASHQNPAKSYGKSSPS

SEQ ID NO: 579 - protein, 896 aa, Datisca glomerata
MMEYSAVYTSNIPTFPTPVQETNIELDFVDELLSDGCWLEVTDSSIRPLTDQSSYLQDNSHLITNPHHQIYQDHEDPDHHHQNQGSFSFHEIQSESVVIEGSDQITSRKWWIAPRSYPSHSSSVKERLMLAIGYLRECTKDRDVLIQIWVPARSKGSQQDVTTNYRKIIPGDNYHLGGGDEENWQEIGGVGYGYGYGLPCRGMMGKNMQDQWGFDVRFIRKDEYMRFSYGQQVDVRGCLALPVFERGSGICLGVVEILMTTQRQLNYRPELDYINEALELQSVDLRSFHNFSPPTIKGFDELYQAALGEIVEVLTSVCKTHRLPLALTWAPCSQQGKTGCYKHSDGNFAPCVSTVESACYVAEVDTLGFHEACLEQHLFKGQGIVGTSFTTNKPCFAVDITAFSKNEYPFCHHARIFGLRAAIAIPVRSTYTGSADFVLEFFLPKDCEDNEEQKRMLNSLSIVIQQSCRSLHIATDNKEVDGEENIVPQVSAASEASFPKESSWIAHMIEAQQKGKGISVSMEYQIEEPREEFKVTTHWDNIHGGLQNGQVFSEFGQLQQSSGAKGSVEGGADSYSFGSHQSSGGRKAGEKRRTKAEKTISLPVLRQYFAGSLKDAAKSIGVCPTTLKRICRQHGISRWPSRKIKKVGHSLRKLQLVIDSVQGAEGAIQIGSFYKSFPELSSPTFAGTSPFTSLNMTDHQAQFNHHQAESGLFSHGAPSKSPTSSCSHNSGPGAKQYSTINTLAGGDVLVTGRIGMLNRACSEAELYGLHQEEPKILRSQSPPSFGEHPDYLTPMHSAFKVKATLGEEKIRFSLQQNWGFRDLQLEIARRLNLDDVSRIDIKYVDDDHEWVLMTCDADLEECKEIYRSSHSHTIRLTLHWASHQTLVSSFGSSSPS

SEQ ID NO: 580 - protein, 948 aa, Ceanothus sp.
MSMEYYGAMVPNSTYGNFPNSEVDFMDELLFEGCWLESSSGFNFMQSNSNPHRPPVVDPSHYLPSFESNSSALSSINPHHHQIYHQEDTADHDHQGSLTENHHQTNMSFVIDQGTSSTAAPPDHIGRRLWIGPRAYPDPSSSVKHRLMLAIGYLKDCTKDRDVLIQIWVPIKRGGRQMLTTYDQPYSLNPNCKSLANYRAVSSGYQLLTEEDSAESVGLPGRTFLGKLPDWTPDVRFFRSYEYPRVNYAQQYDVRGSLALPIFERGSGTCLGVVEIVMTTQKVNYRPELEYVCQALEVQAVDLRSSQNFIPPNVKVACDELYQAALSEIVEVLTSVCKTHRLPLALTWAPCVQQGKGGCRHSDENYARCVSTVDSACLVIDLEILGFHEACSEHHLFRGQGIVGTAFSTNKPCFATDITAFSKTEYPLSHHARMFGLHAAVAIPLRSVYTGSSDFVLEFFLPKDCHDPEEQKQMLNSLSVVIQQACRSLYVVVDKEPEEAMLPIRETIVPSDVRLGKEESQKLGSPSEETSPKESSWIAHMMEAQQQGKCLSVSLDYQTEEPKEEFRVTTHWDSNQGGLPNGQVFSDFGQLQQSSGPKVSVEGGGDSYSFGGRRSSGGRKAGEKRRTKTEKTISLQVLRQYFAGSLKDAAKSIGVCPTTLKRICRQHGITRWPSRKIKKVGHSLRKLQLVIDSVQGAEGAIQIGSFYSSFPELSSPKFPGSGPFSSMKSSDQSKQLNSQSESGLFSQGGTMKSPSSSCSQTSGPSVCAAGAQQHITNINGMSSADALMAEDPVGMLKRACSDAELLACNLEETKILPRSQSYKALSENRIFESLPPLPGSSGRNFHDGGALRVKAHFGDEKIRFSLQPNFSFGDLQLEIARRFNLDDISIIDIKYLDDDREWVLLTCNADLEECMEIYKSSQSRTLRLSLQRAPYPNQGSSFGSSSPS

SEQ ID NO: 581 - protein, 964 aa, Cicer arietinum
MEYGGGLVEDCGGFGTMVGGETDMIEELLVEGCWVEASENNLMMMHHDDHMSSSTTPQPHYIPMGDNDEESGNFVVGKRWWIGPQANPGPSTSVKERLVLAVGYLKEYTKNSNSNSTSNSNSNSNSNSNVLIQIWVPLRRRSGLFHNQYHNPNPVHESLPISVPNSNVQVRFFRSHEYPRVQAHHGSLLALPVFERGTATCLGVIEFLIANQNLINYRPQLDHLSNALEAVDFTSNQNMIPPAVKELYEAAVNEIVQVLASVCKTHNLPLALTWAPCIQQEGGGRGKGGCSNSNGNSNSNSNGSNNNMMMSCVSTVDSACYIGDVDVLGFQEACSEYHLYNGQGIVGTAFTTTKPCFAIDITAFSKAEYPLAHHANMFGLHAAVAIPLRSVYTGSAADFVLEFFLPKDCLDTHQQKHMLNSLSLVVQQACRSLHLHVVMEDDHHNHNHHHLHHQHQHQHQHEEDQFTFPTTNIYMPSVDAAAAAPVVVLSQVEADASASASACSTKETTSSSCSWIAHMMEAQHKGKGVSVSLEYLQEPKEEFKVTTCNWEREREGNSVFSEFGQVLQQQQHEHQSMSNSRASTVVSVEGGEESGGGGGSGGGGRRSSCSSNGRKSGDKRRTKAEKTISLPVLRQYFAGSLKDAAKSIGVCPTTLKRICRQHGITRWPSRKIKKVGHSLKKLQLVIDSVQGAEGAIQIGSFYASFPELSSATGHSDQSSMKLMHNHGVSDHHNSFYGDGGVTTSNLKSPSSACSQTVGNQTNSTLINNNVVLMTESNALASTDHAHAHAHAAALMQIRRTHSEAELLHHHTSNIDIQDYQLHDQDTKQLLLHFNKSQTLPPRPSTTTTTNGYNNSLERGAFRVKATFADEKIRFSLQGMWCFRDLQVEIARRFNLNDMNNLVVKYLDDEGEWVVLACDGDLEECKDLHTSSHTRTIRLSLFQASPLNLHPNTFRNTSSSPPSSS

SEQ ID NO: 582 - protein, 892 aa, Chamaecrista fasciculata
MSIDGVVSSGTLLERPSDSSMDFTYMDELFLDGCWLETTTDASGFLLQSPSSCNPHLDHSFSWPALEVEERQSPLFNEFQETQERINNNNTGEVCNQSENHSDENSEVVTTRWWIGPMANLNPQLSVLERLIKALVYIRDFNKDKDMLIQIWVPINNKAGRKILTTSDLPFSLETRCPNLAKYREISEKYQFSAEEDCKVLVAGLPGRVFIDKVPEWTPDVRFFRSDEYPRVDHAQEYDVRGTLALPVFERGSRTCLGVIEVVMTTQKIKYFSELESVCKALEMANLQAVDLRSSKLSSMQNLKVNNSYEAALPEIQQILRSACEMHKLPLAQTWVPCIQQGKEGCRHSDDNYLHCISPVEHACYVGDPCVRGFHEACCEHHLLKGQGVAGGAFMTNQPCFSTDITSLSKTDYPLSHHARILGLGAAVAIRLRSIHSSVDDFVLEFFLPVNCTDSEEQKKMLTSLSMIIQRVCRSLRVITDKELEEETSISMDEVIASADSRSAKMELQQSRTDEKASETGNDRQLSDLGQQEESISKGNLDYVAECSTIGGEGSLPIVGVSKMGDKRRTKAEKTITLQVLRQYFAGSLKDAAKNIGVCTTTLKRICRQHGIKRWPSRKIKKVGHSLQKLQLVIDSVHQGASSAFQIDSFYSKFPELASPKLPVSSSLFSTWKQIDNNNNPNPSSTCLQSPEAPSSSCSQSSSSSHSCSNTPEQHHQHQHYNTQSVDGIKDHHHASVGEDCENGVLKRITSEVELKIFSQDKSELNLRRCQSHETLGQLPKTALKGSSGTHKTPDQAQSQRVKVTFGEEKARFRMPGTWGYQHLLREIATRFNIDDMSKYDLKYLDDDSEWVLLTCDADLEECIDVCQSSQSSTIKLCLQVSRTLGLHDCKS

SEQ ID NO: 583 - protein, 924 aa, Cercocarpus sp.
MDYGGLMSNPSYGTLSDSTMEVDFMDELLFEGCWLESNSGLNLLQQQHQQPAGPPVSQALTDHPSHYFPPYESNPTAAHLSITPHQHQQIYQEDTDGSYPESHSSFVVEGNTEAGRRLWIGPRANPGPTSSVKERLMLAIGYLKECTKGRDVLIQIWVPIKRGGRQYLTTQDQPFSLDPNSKSLAGYRNVSKDYQFITDEDSAESVGLPGRAFLGKLPEWTPDVRFFRSYEYPRIEYAQQYHVRGSLALPIFERGSGTCLGVVEIVMTTQKVNYRPELEYVCQALEVNLRSSQNFCPPCVKTCDELYQAALAEIVEVLTSVCKTHRLPLAQTWAPCVQQGKGGCRHSDENYAHCVSTVDVACFVADLDILGFHDACSEHHLFRGQGIVGTAFTTNKPCFATDIKAFSKTEYPLSHHARMFGLHAAVAIPFRSVYTGPADFVLEFFLPKDCQDHEEQKQMLNSLCIVIQQACRSLHVDVDKELEEEVMFPVRESVVASDVGLHKEETQKLMSSPTEEPSAKESSWIAHMIEAQQKGKGVSVSLDYQTEEPKEEFKVTTHWDNTQGSLHNGQVFSEFGQLHQSSGLNGNVEGGADSYSFGGRRTSGGRKSGEKRRTKTEKTISLPVLRQYFAGSLKDAAKSIGVCPTTLKRICRQHGITRWPSRKIKKVGHSLKKLQLVIDSVQGAEGAIHIGSFYSSFPELNSPKFPGSGQYSSLNMSDHSKQVNPQHESGLFSHGTTTKSPSSSCSQTSGPSVCVPGAHQHPVTINALSSGDAFMTEDPVGVLKRACGDADLHASFQEETKLVHRSQSHKSFSDNLTYENLPPLPGSSSRNSRDGGLYRVKATFRDEKIRFSMLPNCSFRDLQLEIARRFNLDDVSRIEIKYLDDDREWVLLQCDADLEECMEIYSSSPGRTVRLCLQQAFIQI

SEQ ID NO: 584 - protein, 936 aa, Casuarina glauca; identical to SEQ ID NO: 24

SEQ ID NO: 585 - protein, 582 aa, Cajanus cajan; identical to SEQ ID NO: 16

SEQ ID NO: 586 - protein, 869 aa, Arachis ipaensis
MEYGGIVHNENGGFGSLSESAVEAEVDLVDELLVEGCWVETTSAGGCYNWMHNPSDAVVAPQPQYLEMLQLQLQEESSSSSSDQESLVGKRWWIGPTRPGPSSSSSSSSSSSVKERLVVAVGYLKDYTKNNNLLIQIWVPPRRSPLPLPLPLPLDVLAFPNPSPNPNPNLCVRFLRSHEYSHHYQAQQHYDLRGSIALPVFERGTATCLGVLDILITNHLNLTNNYRPQLDNVCNALEQAVDFRSSHQNLNANFIPPAIKVCQVYEELYQAALNEIVEVLTSVCKTQNLPLGLTWAPCIQQGKCGCGHSSAMCVSTVDTACYVGDLEMLGFQEACSEYHLFKGQGIVGTAFTSAKPCFAIDITAFSRAEYPLSHLANIFGLHAAVAIPLRSLYTGSADFVLEFFLPKDCHDTEQQKHMLNSLSMLVQQACRSLHVATDDDFTPPMLTHHQAQAQIMEEACSKDQSWIAHMMEAQVQQKGKGVCVSLEYQMEEPKEEFKVTTNWDTTNDQAHHQLFSSSDFGHIDVLEHSRSRASTAVDGGEESYALGGRRSSSSGSGGRKSGDKRRTKAEKTISLPVLRQYFAGSLKDAAKSIGVCPTTLKRICRQHGITRWPSRKIKKVGHSLKKLQLVIDSVQGAEGAIQIGSFYASFPELSSTDLSSRSESSPSKKTHTTNIPHHQNPNNNTFLKSPPSSACSQTLDVVMTESSEAALLLNRAHSEAAELLQHASLQSQEDTKHNSFISSRSNNKSHHHHSQDRDKERGAFRVKATFGDEKIRFSLQPNWGFRDLQLEMARRFNLNDISISSSNIDLKYLDEDGEWVLLACDADLEECKDIHRSSQSRTIRLSLFQASPLNHLATNTFGNGTTSPS

SEQ ID NO: 587 - protein, 762 aa, Arachis duranensis
MEYGGIVHNENGAFGSLSESAVEAEVDLVDELLVEGCWVETTSAGGCYNWMHNPSDAVVAPQPQYLEMLQLQLQEESSSSSSDQESLVGKRWWIGPTRPGPSSSSSSSSSVKERLVVAVGYLKDYTKNNNLLIQIWVPPRRSPLPLPLPLPLDVLTFPNPSPNPNPNLCVRFLRSHEYSHHYQAQQHYDLRGSIALPVFERGTATCLGVLDILITNHLNLTNNYRPQLDNVCNALEQAVDFRSSHQNLNANFMPPAIKVVYEELYQAALNEIVEVLTSVCKTQNLPLGLTWAPCIQQGKCGCGHSSAMCVSTVDTACYVGDLEMLGFQEACSEYHLFKGQGIVGTAFTSAKPCFAIDITAFSRAEYPLSHLANIFGLHAAVAIPLRSLYTGSADFVLEFFLPKDCHDTEQQKHMLNSLSMLVQQACRSLHVATEDDFTPPMLTHHQAQAQIMEEACSKDQSWIAHMMEAQVQQKGKGVCVSLEYQMEEPKEEFKVTTNWDTANDQAHHQLFSSSDFGHIDVLEHSRSRASTAVDGGEESYALGGRRSSSSGSGGRKSGDKRRTKAEKTISLPVLRQYFAGSLKDAAKSIGAVCPTTLKRICRQHGITRWPSRKIKKVGHSLKKLQLVIDSVQGAEGAIQIGSFYASFPELSSTDLSSRSESSPSKKTHSTTIPHQNHNNNTFLKSPPSSACSQTLDVVMTESSEAALLLKRAHSEAAELLQHASLQSQEDTKHNSFISSRSNNKSHHHHSQDRDKERGAFRV

SEQ ID NO: 588 - protein, 901 aa, Alnus glutinosa
MEYGTASFTAPNSATYGNFSPTDHTAAMEMDFMDELLLEGCWLETTRALNDPSPYYLPTLDSNINHHQQIYQEDQTVGVFPESETIIVEGTELGRRWWIGPRANPGPSSSVKERLMLAVGYLRECTKNMNVLLQLWVPVRRGGSRYFLTSQDQPYYRNVCRAYQFAVEEDMEESGGLPGRVFMGKLPDQWTPPDVRFFKRDEYPRINYAQQYDVRGSLALPVFERGSGTCLGVVEIVTTTQKINYRPELEHVCQAQAVDLRSSQYFSPPGIKVFYQACHDELYPAALAEIIEVLATVCKTHRLPLALTWAPCYQQGKGGCRQYSDENYAQCLSIVDTACFVADVDVLGFHEACSEHHLFRGQGTVGTAFTTAKPCFASDITAFSKTEYPLSHHARMFGLRAAVAIPLRSIYTGSADFVLEFFLPKDCQDTEEQKQMLNSLSIVLQQACRSLHAVIDKELPDEDEIIYPVKEVAIEECHKSGSSTLKEGSPKDQSSWIAHMMEAQQKGKGVSISLEYQEEEQNEEFKVTTHWDNINTQGGSCNGQAFSDFGQVQQSSGSKGSVEGGGDSYSYGSRRSSGGRKSGEKRRTKTEKTISLPVLRQYFAGSLKDAAKSIGVCPTTLKRICRQHGITRWPSRKIKKVGHSLRKLQLVIDSVQGAEGAIQIGSFYSNFPELSSPATSSFSSLKMSENSKQSNPIPESSGLFTPSKSPPSSCSQTSGPSIFCATAANHHHTTTINALSSGDTLMRENPIGILQMACSEADLHALNQQEANLLQNAMITCGLDTTLPVLPESSSHNSRDGGAFRVKATFGDEKIRFSLHPNWTFGDLQMEIRRRFNLDDISRVDLKYLDDDREWVLLTCDADFQECIDIYRASQSHTIRLSLQHASNPNLGSPFGSSGLS

SEQ ID NO: 589 - DNA, 741 bp, Vigna unguiculata
  source 1..741: mol_type = unassigned DNA
gccaagtggaacatggagaggaagtctgcagcttcaagcaataccttcttcccaaggatctcacatcagactgttatcagtaaccattcacggtctttcactttttgtatttattttatacatcttttcatggagtctatattgtttattgatctttttggtattgtcttctactgagtaataaaaatatactgtattggtattttaaatatatttttaatatatttaaaaaagtcaaaataaatgataatcagtgcattatgaagacacataaaagaacaacacaaaaaacccagtagaaaattcaaattccttttcatctctcttatgtttagtaattattcatcacatttatatctttacccctttattttctctttattactctcaacgtatgtacatttcacatttcacatttcatcaccactttataatttaacccatacacacacattgcatttgtctaccttggtttcaaaatttggtgagcgagcccctcctacgttattctaagttgtgggtcccagtggccttctagaaaatttgcagttctctccgggtcattaaatacaagactttgatgagcaggtgagcactgtataagcttagttctccattcctttcctgctacccctgtctctcttcttcttcatctcactcacttactcacttttctcatcatgatcctacttcatccccatacataggataatataggggagttgagttagtggaagaaag

SEQ ID NO: 590 - DNA, 2873 bp, Parasponia rugosa
  source 1..2873: mol_type = unassigned DNA
gccaaatgggaatgggaatgagattttcaacctttccccgaccaattcctgttccctgcaaaattaagaaggtgttgcctgatttttaatgggtcccacacacactgtttatacctaattagtgaagaacataatggagtgaaatacgagaatcaattctctcttgttccctatattcccattcctgatatatacgtacgcgtaaaatttctattaatgatcaattaaattaatgtgacgcgctgacaaaatggatggatgaattaaagtaccatacgtaccctagtactaattagtgttaaaaccaagtggatattaaaataataagctggttacgtaatggtacacccgtatagaagccactaatacataatcactaattatgaattacctacgatgtaagaatttttattagattaaatacaaatagtggtattcatgttgcagagtgcacatatattttaggatacttgctgttgggttcatgaaaaaatcatcggacttagtatatataatgaaaacccacaaaaaaagtcagcatataaatgcattggaatatatacacataattctaagttaatgaagagagggccaaaaagcaatatactagtctgacttatgaacttcggttaaaggtaaaaatggtttttgaagttatctgagaatttaaaacgcaccaataaatcatgccgcgttgcagaggtccaaacaattcataatctgaccctatcaattaccactcaaaaaggttaaattaaacagcataaagttatttcttaaggccgtcttatagaatctcttattctcttaactaaaaggccggggtccaacaatataattactaattaaaatccttttttaacagccacaaacccaacaaaaaaaaaaaaaaaaaatgataaataacttatttttaaaaaaaggaaaagaaacgatcattttccataaagccttcaactcctatagcagcgcaaattattttaaagaaattttaaaaaacaactgtagagacgcggaggtcttttttttttatggttttagaatttatatattattatttctctaaaagaaaaaagcagactgtcatcattttcagcgatggcgtgcacgtgtgttaagagtacattgtacaaacaagcgatgaactatagctaactctctgttcggtcgccacgtgtcacgtgtacatcgcgagctagccgcatcctgtgagctgttcgagttttttttttttttttttaatttttttgtggggagggagaagaatgagaaaaacaaagaagtagatgcgaaaaacttcgagattagaatattcaacgtagctttcattgtccaaaacaaggcccataaccagatacccctcctatactcattctgtctctttctgttctttttttttttttttccttttttcttataaactcaaaaaatgtgaccacacatactctattacaccattactacatcaatacacatatataaattcaccttatagtaaactgttaattccttcatatcattgctaagcacacattattattcaagtacaacacagcagttgactacacagaagcctagactattgaaagaaatttataaaatttcgagtataccactgtgacatatgaccgattgctgtgtgtgtaccgtaccttcccttacgggtccaacgacttaaatattagattcgtttcttgctttcgttgttcctgtgttattaattatattatttattttactattactattacatatattatattcttgtgtacttgttaaatataggagattcttcatacgtccaccccgagggaattagggatatacagagaaactagagctgggtgtcagagaaggaaaaacaactacttggatattattttggtgtgtgagctttccagctagcttaaaaactgagggggaaaaaaaaaacgaagagaaaaaagaaagagagggagagattaattcttggatttcgttttgagtgtatctttgaagggttgataatcatcagagattattgattttaatcttgtttgttttcccgatcgatccgaatctggagaagtggacaatatcatatcacacaactgagattttactaggagtttttttcacagtgagcgagtgaatttctctctctttgttgtacttaattttcttgtattttttttctcttctttcatagtttccattgttttttcccttcattagtttcatgcacatgcattaggtttatcataaaatgatcaattttaagcttcaatatatgtgtatatatatatatttggtatctcattctatatctttgattctctccattatatctggatcctgatcatattaccacaaagcaaaacttgatgatataaattgaggaagtcattcttaactagttagggtttcgcagatttgctcatgcaacctacatatttttttttcgattcagtgatctttgcatgacactaatattttcgattttaaattcagattccacttttgatatatattatgctatttatatcatcaatactctaatcgaagctgatgtaatttccggactaatttaaaatggctaccttttagaatcaacaaaaaagggttttaaaacttgacatagatttattttaatttaaacagtacctgtatctgtcgctatatatatgtgaaagtttcatatatttttttataggacactatcttcttcctctaaaatgcatatctcaccacacaattttcataaccatcatttttctacaaactcgaactagacaatactcattcccttaatccattaggctgattcgcgaagaagaagaagaagaagaagaaaaatcaaattaatctgaagatactatatagcataatataat

SEQ ID NO: 591 - DNA, 3038 bp, Medicago truncatula
  source 1..3038: mol_type = unassigned DNA
gccatgtggcgagcagagagatggcccgcaagagttcctacttccaactccctcatcaccacttatctttcactttccatattctttttgtttggccattaataacgtgtgccaatattctgctgtagataaccttcatctaatcaaatatactatatagtataatcatctcccactatattcatattatatagccggttatgcatagattataaatatattatgtataagattattattatactataaaaggggtgggactttacataccattattaatttctatatcatgtagatgtatccatattgcttttttttaaggaagtaaaacttatttaaaataataaataaaagtaaaacttattgatttaaagaaggggatgtggaaaattagaaaagaaaatatatgaaaggggaacaaaatcaaacccatgctaaacaagttttagaacaaccttaattaagtagtcccggtttgtattgctctatgtactttgctagtaatcacaataaactcatatcaatatttttatttgcgatataacatcagagggagtgttcaaaatagagtgttactaacacttctcttaccacgagaggaatgctaataatactcaatttttaacacgctctttgtcactcactcttttattgaatgaaatcaatgtatgtctcaccactttgtatatgttctatttccaaagtgtagacccacaatgatttaaatcaataagagagtgaatatcagagggagtgttggagttaagattcttttcatttatgtctttctccatttgttccatttgaaaagataaagatacataaaaagtaaaaaaataaaaaaatatttattatagtggtacccactcaatggtaggatccacaacctttttatgtgtgtatctctttctaaatgatattctccatttatttttattgatggagaggatcttaactctcaaaagagagtgttactagcacttctcttatcacaattatagataaaagtaggttagactaaacaatattttacaaggtgtatacttggtttgataaaataaaaaaataaaaaaatacaaggtccttttaataaaaatggtgaaagtcttttttgaaaactttattatggtatgtatcccaacttaagtgtttattatttattttggttaatttaaatgtttattttttatttttttttgtcaattagtctagtggttagactcacacacattatgtgtggagaagtggagaatctgaggttcgaactccggtccttgcacaaattatctctggtagctaccaactgagctacacttacgagacaatttaaatgcttatttaacattattgtttttaaataattaatccatttaatgaccaacgagctaataagtcaatgaaataaagttatattttgatattagcatggtaatcaaaaagtatgactttgtataacaaactatttcaattttatttaataataataataataataatatattcaaatatgccaaaaaattactgtgacctaatatgcttaaattaataaaaatattttcactaaataagttgaaaatgtttaacaaggtataatgtataatataataagaataattataaaaaacaaattattcatagtcggtctaataattttaaaagaatttttttgtggtctgaaatctgatatttgttcttaactaaatagagttgtctttttttttttttaatatagtttgagtcttgtctatttaacaaaaaaaaaaaaaagtttggcttgcgcttgaagtaggctcagacataagactatgttgatttgatttaaccttcttccatccctaaccacgattgtgtcttcacaaatattaaaaacgttatttattgttcttgtgagcttatcacaattgataggaacaacgcataatatatgcaaagtccgaggtacgaaccccagacaccaacggcgaaaaaagaaaaaaaaatcttatttatcgattgttcaacatcgtaattaaattcaaaagagcttatttttttatttgattacttattcaaaaagtgattttgcatatgatttgtttttaattttgaacacaattacttttttaatcaatatctacatctaactattttacatctattgtaattaacaagaaacactagctatgatgagaacataaactaatataaattatcaacaaatttaattttacaaagttttttcaatttgatattatatttaaatgtgaaaggaagtaataggtagttagggagacagagatcccaaagttactagtatgattttgtaccctgccaactattaattgaattcaacggcaagaataatatacctatccttgtctctttctgtctctcattgattgagttcatatagtactagtacatgttgatagtatatatgtttctatgcatgtgttgctctcagcacgagtgtatgttatgttatgttatgttatacaagaagcagcaaaaacacatatagaagaagggagtataatataataaaataaaataaaataatttacagcgctgctaattgtgaaagagaatatagagatataaaatatagatataggccagtcgctgctttagcttactagtgggtccaactaaactaaaaatataaagaaattgaaattgcatttttggtcattaaataggagacctgttgatcatctaaatatatcatatcaattaagcaaaagcattgacgcaaggctctgcctgcacaaaatactacttcttcttaatcattcattcactcactacaactaattaggttaatctctatctatcctgcctgcagcttcacacacatcacatacctaatttatttccttgtttcatttctctttaatttccgtacttattattctacgtacgtgttctcctcaactacttaacttaatttaataattgactcttccttcattccctttctctaatatatatcatgacatgaatgatatcttctgatctttttatataggaggatctgagaaacaactttaattataagg

SEQ ID NO: 592 - DNA, 898 bp, Lupinus angustifolius
  source 1..898: mol_type = unassigned DNA
tccatgtggcagacggagagaaacccctttctactactactaactatatatatatatatatatatgtataatacatatagtgttattattatagtcgatcataaacttcactcacctttgcctgcctatgttatactgtacatttcattaagtaatgatctaaattaaattgcacagcctgtcatacatacatatacattattattactacatggacagtggtcctctcttccacaaagttattgtcctcatgttcctatttaatactattctataaaataatataaaatattgatttattttttataacttttttcttctcattaaataatgtattttgattgacttgagacatcattgggacaccaataaaaacaaaagatattcatgatgagacagtaaattacagaactaggcaaacagacataccgaccactttgcaattaataacatccctactttctatctcactctccttcgctatttatatgttactttcagcatttgatatatggtatatattgtgctgagttctgtgtccccccaaattaaagcaccagctacatagattataaatattaatctccatttatttagtctatgtatataggctatatatagcaccggtaagtttgtgtgagagagagagattattataaataaagttggcacgcagagggaaacaattatcgaaacattactcactcaaggcctcattcattttccttttgtgcaaggtgagtgtgtcattatctacttaagattcgatgtcctatatatacacacacatatatgatttggttgaacttaactgacatgaatgaatgttacatgatttaatgtaaaattgtaggatcagatatatcgtgggaggaaaagtaagtaaattagaaagaag

SEQ ID NO: 593 - DNA, 956 bp, Lotus japonicus
  source 1..956: mol_type = unassigned DNA
gccatgtggcacgcagagaggagcccacaagaggcgagaccctatttctctgtctctctttaattaattttgtttagagtcaagttcatcatgataatctgccactattatatagccggtgttgcgcatagatgggtagatatagatatatgttattaattacagctgctacagccacagagtacaaagaaagaattgaaagaaaggcgtgagactttacattacattattaattgatgatatagaaatagaaatagaaataggaataggtagagtcgacagacatcccgaattactagcattttgtacccttcaatcctataataacaggaataatataccattcttgtctctttctgaatttactcccttattaatattctttcctcaagtcatgagtagttaagttttagaagcttgttgttttgctgtgttgtttcttactcgagaggcagcaagcatatactgaatactacatttatttatagaatataataataatttacagctgataactgtgaaagaatatttatttatatgttatatgtattgtatatacctgccacggtgaggggggattagggatataaaaactggagaccactctttgattttgcttacacttgtgggtcctagcaagatacaattaaagaaattttgggttttaaataagagacttgttgatcgcatgttgaggcaaggcaatcattttcccaagcactgcttattaattacaaaccaccttctcatctcttgctcttcaacttagcactagacagaatctagcttcaaacctaattaaggtgagtgagtcttgtacttgatccactcttgatattcatgccctcactttctttctcacttactatgtgtttgtggatatgtctgaattaatgatgattcaactcacttaactgatcatgtcaaattacaggtacttaattggatcagctagc

SEQ ID NO: 594 - DNA, 2514 bp, Glycine max
  source 1..2514: mol_type = unassigned DNA
tccagctggtcttgttcgtacgatgacccatttcacgacagatgtcagaattataaatccttcgtttttatttattatttatatatgtaaaatttatttacaacgtcagcagttcaagctagagcaaaaagcactaagctcgtaggtggagacaatctcaatattccaaatgctagatttgtttttctttctttcctcatttgtgattaaaaatgtctctctaagtttacgtttttttttttgttttttaaaaaaaagtcccaagcatccatgttgatgtagctagccaggcaggaaattaaacaatggccaaggtttaactacagtggcagtggttatcacttatcatctaggttcttggagatgcattacgtcaattaattcaccaatgaaacagagaagaatctttttcaattttcgcggcctcaacttggacgttagaattaaaaaaaaaatcaaagaattccgaatcgacgaatgaagcttaggtattgttgcgatccacttgaaggtagatagtagaaacataacatcaatttgtttgggcgatccacttatcatctctggttggcatgtggcgcacagagcatcctctctatattctttttgttttggtcatcggaatcatctcccactattatacagccggtcatgcatcaatattatacatacaaagagctgcgactttagcttacttaaattgattaatgggcagacacacaaccctagcacccccaacactcctatcaatcattttttttttttttttgtaacgagtaaggtatgttggtttgagttttctttacataataaccaagtacttttccatgtatttacggatatttaaatttaagtaaattttaaaataaaagcatttaaattgataataaaaatgtcattattatatattcaatatgtgataaaattatgtatcttaaatataacaaactaccaccaccaagcacactagttaattgatgtatagttgttttaacttaattagagatcttaaattcgaatattagacatataattatattcaatacttaaagaaagaatcttatcgttcatagtacgtgatcctatatggttcaaacataattgtctccaataaaaaatatttatgatcaatttagacaaaaaattacaataaactataataatatattttcattactataacagatattttattttattagtgttcatgttagaaaacacactttaaaaaattttcaaattaaaaagaatcaaagaaaccttataaatctattctgcttaacttgagaatatcacacttatttatgtcatgtgttttctaatgattttgtcatcgttttctactaacatatataaaaggagtgatgtgtatcacaccttactcacgtgataaaaatgttttagaatatcaaaattggtcctaagttctttgcattcatggcataatgattgttaatttgtcttgatctcggtcatctttaactctttaaggattgagccatatgaaaggattcaacccttaccttgtatcctagtatgtgtatatctaactatagacactctataattccttaagttttgagtttaaaaggcatagacgcttgatatgattaatcaacttgatggaatagtccaattagatagaaatacataattaatgagacaaaaaaaatattaaaaagaaaattatgaaaataattattcaaataaaacacataatttctatatctattaatttaatatagtgtccaatttttttaagatttatttcgattttatttaaaatttaaaaatgaatataagtaataacttttgaaaggaataaaaaaatagtaatacaggagaagttatgtgatttagcgaaaatgatgaatcttaaaaaacctttattcaagtgaagacttaaatttataatataagaataaattacgtcatatatttttctataaaaaataataaactaatttttccttgaaaacatgaagaattatatttaatttttattactttgtaagtaaaaaaatacttttttcttttaaaaaaatcatctcaaagaaacataattacccagtaacttgaattcatctctatatgttgctttcatcatgagaacgactttattttattttattttaatttgctggggtgttgtttgtaatacaggaagcatagagaatatagtgtatagtacatgaaggatataattatataatttacagcagtgataagcaagggaaaaatatgtatatataaataaatacaggccaaggtgagagatgtgagactgaggaggcactctctggtttttgctttccttttctggtcattatataagaggactgtggatcggtcgcaagtcgatcgagttgagtagaggtaatcatattttctcatcaagcaatattaagtttaaggtgagttagcacttgatggctccacctctctctgggtgattaaacttatataattgattgttttatgtaatgtaaaatgataggataggatcgaggaagc

SEQ ID NO: 595 - DNA, 3034 bp, Dryas drummondii
  source 1..3034: mol_type = unassigned DNA
gccacgtggatgatcaaattgcttgatccactttataccatgttaaaattagaatatatatttcaaaatcaatcaataatggatgaagagatctcaaatttaatatattatgcacaatgtgagctttatattcttaagtctcaagtctcaacccattccatctcgtgtggtcatattgagtttaatgcatggataattatattagtagacatagagcacctgtgatgaaattgaacttgcacgtaaaaatgaataatatgctataatattaagttaaaattcgagttacttaatttaaaatcaatcaacaataaatggaaagacgtacttaaaattatatatatatatatctattgacatataagattgacttagaacatcttatgttagattatatctcaacgttctccatcttatgtggctagattgagtttaacacatggatcaattatattagataatgtgaaaacttgagacatatatatatatataaattgtccgatatagtactatgttaaaattaaaatatcttattcaaaaccaattaataatgaatgaaacaaaaaacaaaaatcaacatgttccaaatttcatgcttattttgagataacatatgtgtctatattagcttattggatacttgaaaaatcaaattcctgagttaatttagaaccttccatctataatcccaggttggtttaaatattttcccattcgagcaggccctaattaacaagcaaaaacctgtctcatggagtaaaggttaagatgaaaaaaccaaaaatggttctttagatcacatgagaatcttttaatccaaagggaactcaccaatagtatgccaagtgtctcatccaaaaaggtcccaaataataaaaagctaaaaatcatataataccaagcaaaggttaaaaaagatggttttcttttcttcttttattaaatgctgtctaggaatctcttgtttactcaccaatagaactgtatgaatcttttttttacagccttcaattaaaaattaaaaaaggaataatgataaaacaataataaaacccttttcacaacttttcacttgcaaataaagaaatggcattaatgctattaatgtaaggagaaattattctatataacgaatatattgacacgtggtatgatcagtttatgtgttataatatgagtggatgttattaatattatatcctactaatataaatacatcgttcaataatatatttacacgttaaattagttataccacataataatatatcaattataccttataatttttctaacgaaagaagtaagaggcttcgtatgtttgattttgaggttaattaagtaattttttttcttaaataatggacatgtttagagaggcatcgttttcaccgatggcgtgcacgtgtgtatgtagagagtacactacacacagtatgtcacttgaaaatacacagagaatgtgtaggatgagtgtccatctgacatgtgtcgtacggacatcgcaaatagccgcatacactagtgagagagtgtgtgtgtgactgagagagagagtgagctcctgtgcataaaaacaaagatgtagattcgaaagctcccacatcaaaatattcaaaaaataatttaaaaaaaaaaaactttaatttgcttcttggtgattttccgaaactactatactctttctgtccctttctgtttttttcactccctaatttactcattcactcattcccatttaaagaatatatgtgttacttacatagttacatggtcgattttcttttttaaatatttgtgtttgcgtgcgcgcgcgtgtgagtgtgtgcgtgtggggaagaactcaaacaagcactggtgctactgctactacaaatagctgaggttgaaccctcatttgctaaccttgagagtttgagactaattgagtacagttgactgccagaacaaaacataactggaattgaaaggatgcatgattggaagatgagattggaatctgatagactctccttgatatagtatacatgggtttccctttatttatttaattattttatttattgtgggtccaacttaaataagagattctttttcagtttttttaaggttttctttggttcttaaataggagattcttcacttcacacgtcctaccttaaaagaattagacacccaagaaaccaagagctgcaggaagaggaacaagagaactgaggaggatatatagtaaacccattttgagagacttgagagagaagaaaccattcatccaattccttttgtggatgtaggagatacccaattccatatttcttcaggcatagtagacacatatatgcccaactgagatcattttccttggaatttatctgaattcacacagtgagtgatacatcacattcttttctttctcctttctttctatatatggccagtttccatgtatgtgaaaatgttagtgtgggttttgatttaactttctacaaatgggacttgctatgtttgcatctttctttgagcaaaaattaatcaaccagtttcttgacatcataaaaaaattggataaccttatgaactatgatatgggttcttgattttctctgacttatgaatcctgacatcaaagggggattcatatacttgggttttacattgaaatcttgctttgttaattgtcatgagtgcaatttgagcccaggctgatgtaacttctggaccaataaaagaaaaaaataaaactttttagagtggacaaaagttttaaattttacatcgtaaataagagagtgtgtgtgtttgtgtgtatgcgtatgacagtatgaatcttcatgtttgtggtctatatgaaactgtagaaagtttgttggtctgaaatgcatttgtatatgggcaaaaggaataaaacttgctggaagttgctgttttatttttcatctcttctcttctgggtcttgacagtgtttgcaattgcgttgtagattgtaataggctgctctactagaaacttgaagaagaaaaactcatcatcact

SEQ ID NO: 596 - DNA, 3048 bp, Discaria sp.
  source 1..3048: mol_type = unassigned DNA
ctcagctggttattacccttaactcttacgctttttatgccatacaatacatcttggcatcgcatggcaggggcgtttgggtatagtaaaaaaacatgcaaaaaaaaaaatgcaatttttttcttcaaattacaaaagcactgccccacttttcgtatgaatacgaatgccatacgtaacatgaaagtgctgtccatttcaattttctatgagacagatatttttaaataatctgaatttttgaagttataaagtttttatttttttatttcttgaaaggttataagttaaattagtgaagttttgtcaactttggatattcatttaattaaattaacatatgaggtgggttttgggtgaagcccacataattattagaaatcgtgtaatgtaagcagtgaggtggaactgggcccccataaaatagaagtaaagtaaaaatgtccatgtcctttctgaggatagtgaaaggcaatccttttattccaaagactgaaatagtgggcagggcgtcgaatgtttatagaaaaaaataaataaataaataaaggaaagaaagaaagacactttcacttcgtacttggaagatttgttatgccttttttcaattgtatctttgttctgtttgtgtgcctgtgtacgatgggtttttttcttcttttattttttatttttttcaagataaacaaatataccaaattgaagacttattccatttcttcggttttgttatttactatatttttataataaaaaaagaaagttttacttatttccttatataaaaaagtagagagtaaaacatgttatgacaaatgtcgcccatctattggagacatgtggggtggagattcgagtatattcacataacgagaatttaacacataatctaatattttaaagtgttaatgagtttaaaagtagagttattcagatgaactgcttcttctgtttgtcagctttaattgtttataaaatagacttcaatatttctacatcataaaggcagggtcatacacatgaattaaaggattgagcgcgtttttattctcctttttatgctatgagattttacaaattttcaccatataaactaatttatagactcaaatgagatttatctaaaagttgtaagttcttcatacttttattgtgaaatagtaggttggagatgctttcctctttttttgtttaaataaaaaattattataatctgatacgaaattaatttataatcactaactttaccaatatacattataaatatttttgcaataaatatataatattaaaaacgattactgcttattcttaaaaaataaaaataaaaaataaaaaataaaaaaacgattactaacttgcactgaagtaaagttgccaacttgtttaaattgttaacatcgaaagattcgtcctttcctggtaaaaaaataaaataaataaataaagagagaggctgggagaaaagaagatgtaaggtggatatgtggcatgagagtgtaggtaaaaattcggtatattattatatctgtaaatataagaggtgtaatttaatttttaataattttatatgaattcaggtgcaatttttattgtccaagacaagaaaaaaagaaatttagagactttcatcgcaagttccacttcctcaagctgaataaattataaaaaaagaagaagaagttagatatgtgacattagtgattgcgaacccacttttcattttttgaagagaatcctgattccgaaccgattcccctgtctgacttgaattcaatagcaccaacaaacatcagcaacacaaaatacaataataatattattaataatattacaatcaaaagctctctctctctctggtctcaaagactcgaacaaagctaaaactggaggttgactttgaggcgagaacaacaaggcccgagagccaagagggggttatatgaccttacggagtgtgggcgagtggggtccagcgctggcaattagaatcttgtctaccacattaccctttgattgggaatcataaaaaggagtctaaagagataggcccagaattgcaaactttggagttgtggaattgagaggatgtcaccaagggacacactttcttcgctgcttttatgactctgttcctcgttgttgatgttcctggtttctcaggccgccctgttttttatatttcaggatactgaaaattaaaaaaagaaaaaaactataagtaataagcagattacccattcgggtatctccaagaccaagtaagttattcttattccgtttttattaaatttatttatttctgcttacgtttgtttcttctcatgtctttgggtcttacaaatggtagctctttttgtatgatttcaagcttccgtttttatcatctttgtctaaaatatttttgagaaaattgattttctttgggcctaaactagagtaacgaatgcagttgagaaaggtcccgagtgacttttccttttttctttttttttccttggaagaatcagtggggaagtgggtttttatttatttattttattcctttttttttttccccatgttactccccttttgttttttatgatggatgtggggattctccaatgagattctattccgttgccgtcagtgctttgtttttttttttgattcgtttagtggtttctgtttcgttcactcatatatattagatttatgagagtaaaagagatgcttaatctccatattatatctgcaaggatttttctctgtttcatcgttaagcttttgatttagtcaagttttctttttgttatttatctaataattctctgagaaagtttcggcaactacttaattcaaagataagtttcggcaaccacttaatacaaagatctttcttgacgattttgggtagttttgttgactggagagtggaattgttcatcgacctcattccattgaataatagctcgcttcagatcaggctcagcttgggacccagatagttgtgtgattagtggacagaatctgactgtgggactttgcccaagggtcatcatattc

SEQ ID NO: 597 - DNA, 1801 bp, Datisca glomerata
  source 1..1801: mol_type = unassigned DNA
gacatatggcgcacaggcacatacaacagtttataccactacccaatactatattgaagcttctaatgctcaatatattaaatgttttaaaaaagaattaaaaatgataaataaaaaagcattcggcggaagaaataattcatgatatatttttaattttaatctgcatcatatatgtctagttgaatcactactccaacatgtattgttgtaattgtggttaattttctcgggaaatttcatgttcaatgtaattcaatttcacaagtataatccatgttgtagttaattactacgaaaatgctcacaactcttagattattgattgataattggatgaaagttaaataaattatgttctaattaatgagtccttatatgagaggcagtcatgcatgcatcatttaattggaaaataattcaggctgcctttaatttcaacctcaaatccttaagccgattgattaattcattgctcatttaagtttataggtcctttttcatgtaattagcttcaacacaatacacatgaaataaatcacatattggttgtgacgatatagttacagaaagaatattattaggctaatgagatactagtttggatggtaatttcattttcatctcatttagaagaacaacaatactcggcttctaaccgttttatcttataattaatattactgtatgacataaatacacatgtatagcgtaaataagaaaactactttaatgaatcataatataagataacacgtgacgttatattatatgtttaggtgaagcatttattaatacatatccagtcattagtctaagtattatttttgcaaaaaacttatccaaagccattagattacttaatataattgaataagtaaataaattttaaaaagagagaaatgcttccatggccaagttgttaattaatgttatttataataaaacaacaattaattattgtgaagttttaataaaacgaaagagtaacttgtagattcaattaaaaataatctaaaattaaaatttagactaagctttaattaatgagatgaagtatcaattatatatatacgttgatgaattattacacatctatattaaaatgatttactatttatacattaattgatttataaatacatattatagatcactttgttcattcgaaacttaatataataaatttgtgatcaaagattaattaagttaaagtggttttgcgcaccgcatatatgtctgtcacaattagtcaaaccagagccgttagattggtgatttaaatatgatgacggtaggagatcaaaccgtagcattttccacaatttgtttttaaaaaaaaagttgatttttctaggtttggagtgggacctacataacgccagattcttgtttgtccttaaatagtagattcctccatacactcaaacacagcccagagtgaagtacacaacacagaccagaaactagagagagaggaggaggagagagagaggtaaaacttcatcactgaggactgagggtcacttagaaatcaaaaactctatctaatccaacatgtttttgttggtaatatgatcatgttttagaggaacactactccaagttgaggttttttttttgccaacaattctcccacaagagtaagtctgtggctattattatctagattccattttctttcataaatattgaaagaattaacctagtacgtacttactcgatatagaattcatgtaaatgaactaatcattggatcgttgtataggatcgtaagacgggaagcgtaaacaataacgac

SEQ ID NO: 598 - DNA, 1272 bp, Datisca glomerata
  source 1..1272: mol_type = unassigned DNA
gacatgtggcacaaccacaatagactacatcacttccaattacagcttgaagctttgctattttttgcatgaattgaattagaaaaaaaaaattctttaaaatagacataataaggagaaccattgcattcaaatacagcttaatcctgattccccaatctctcataagttgatattgaattctctattaaaaaaattttagattattgacttgtagggaagatttaaaggctaacagaaattaaattaactgtgttaaaatgataggctgatagatagacaatttttcttaaaaaagaaaaaattaggccgtcttttcgatcataattataatattttacgttaataaaacttttattcaccgaattcatattacgatcgagattaagaatattatcgcgtgtatgtatctaccttttatttaattaaaaatatcgtattataacctttgtacagttttacttctattatattaagtagaagcaattaataaaaatgacatattttattaaactaattggacaactaaagtaacacatacaagcatcgatctagtgctaactaattaattagggtttaaaaattaaaaaaatatataaaaaataagagagagagagagagagaaaagttttgccagctaaacagttagcaccgaacattatttgctgctagaaatggattagctaagaacatgggggaataatgaattaatcaaatttattatttaggcaatttcttataaataaattatattttttttctttgtgaatttttgtaattttcttgggggacccactaaacagaagattctttttctgtccttaaatagtagattctcgtacgtttaccaatagcctaaagtacacatcacattgcatagtttcagaaactaaaccaaattccacgactgccaagacaacattatttgctgcaacaatctaacacatccaaccaagttttgacgacaaacatctcttctttacaaagtatgttcctttcggtttttcttcttctcttgatcatataaattttaacttttttggggggttttcttcatcaatcttcttgaaaaccagttctctaagtatgtaaatatcaaccatatgatctaagtttgagttttcaaaaatttatataaagtttcggttattttcgatttttaacgatgtttagtaaaaaaaattcaattgttttaactttaaggttgttcaattttgtaggccaggataccttgaatagttatattaaagaatagcgaattgtataattaaa

SEQ ID NO: 599 - DNA, 3123 bp, Ceanothus sp.
  source 1..3123: mol_type = unassigned DNA
tccaattggattaaatataacagattccgttaaatgcactttagtactttataaaaaatattattcatctaaaaaattttatttcatcctaaattgctaaaaaaaaaaaaataattatcatgaaaattattttatatatatttttttatcatgaaatttttattttcatcataaaatattttttcttctagttttctttttcatctaaaattttttttcatcctaaactgctaaataatttttttttcatgaaaatttgttacgaaattggactaaatgacatgcaaaacgcacagtttaacccgcacgtgaccttcaaaatggagtggcatgtgaccccttatacacggtttctgtaaaaattttcaaaattgaactaaatgacaaaatgcactgtttaacctgtacgtgaccctcaaaatggagtgacatgagagccttatatacgatttctgttaattttttacataattggactaaatgacataattaatgcatcgtttaatccgcacgtgactcccaaaatggagtgacacgtaacccctcaaatgcaattttttaaaaaataaggatatcaaaatgttaaaattaattttacagccccctttaaacaaaattatacaattataaaggacactaaaatatagttttctcttttttttcctaatattttcaaaatcgactgaaaattaaattttagagatcacgtgagagttgagacacacgtgacccttttataacggtttctgtcaatttaaatagatttatactgaatttttattaaaaaaaatagaaaatatcaaatatcaaaattaattgtatagctctaaacgaaactaatcaatttcaaaaagtattgaaatgtagttttttctaaatttaaaataaatcttacgtaaagttatcaactataccaattaaacataccaataaaattaaatatacaaagaaaaagggagagaaatattaaagaaataaaaacagtgagaagatcgaatatgcatatatattccagagtgcaaattaatataaaatgcatataatgataatatatatatatatatatatatatatatatatattatgttctgtctgttttcaccaaaaaaatattttgttctgtctgtatttactatttgggttcatgaaaaaccatgcaatttagaaaacccatttgaagagggccaaaaagctaacctgacttatgaacagaagttaaggtaaaaatggttttaaactctcaaatagaaatctctcataacaaaggagagtttagcttcacacaatgaaaaccagacctattaactaaccaaaggttaaaaacacacccaaaaaattaataaaataattaaataaaaaaaattgtattagcaaaagctgtacttagaatatactagtcaaaaaggctcaaccaagagtaagtaaagaatctttttcacaaagagagagagagagagagagagcctctcttctcattctctatcttctttcttctctctgtgcattgcaaataataataaataaataaaagcagaaactaagagggttcctttaggaattaaaataaagaaataattagagagacatcattatcaaagtgatggcgtgcacgtgtggcactgtttgtcacttggggttgtacagaaactatttctcttaaacaatggaggatcattctccttcttacatgtggcaatcggacagctgagagagtctccctcttttctctcacttttctttcactctctctctctcttccaagaaaaaaacaaaggaggagatgcgaaaactcctagaaaaaacaacatcaaaacccttttgcttttatcgctcaaaccctcatttctgtactctctgtctctttcttgtatttcttttttttctttttcttttttaaattttataataaaactcaaatagtagtactatatatgatgatgaagcacacggcttgagtgagtagaaatatacctcagtttttccgcatttgcacattcaagtacagttgactactactacattaatacacctatatgaaattgtggtggataactgggatatcatatgacagacttataattctcttttctttttcttttctgtggggtccaattcttttcaaaaaaatatattagattctttttctttctataaaaaaattaaaaaattaaaaattaaaaaaaaaaaaattattctttttgtcataggttgtatttgggttgttaaataggagattctccacacgtctggtttgagagaggaattaagagagaccaagattaagaacacaaaggctttaactgagggggtttgaatctaattagattcattaaactgatccctttgagtttgtttgtctaaaaaaggaaacgaaagggaaggaaagtccttttgtggaagacaagaaacacacttgaaaagttttttctcttgttgattcttgttactttctgaaccagcgatcgagattattcagagatcttcaggcatatacatatattttgtatttatagcaaatattcacaaactgatagatatatatttttctaaagtgagtgagtaatctatcttttctctcttcgtatatattaatttcttttccttctttttctactgtcacttccaatatgcatgtctaggttttcactttattatgaagaattttgagtttcaacaaatgggtacttttccttgtttcaattcttaacatttcatgctcttatatgtatatatatactgttttctttgaacccttttcatgacaaaaaacttcatacacatatcaaggaattttcatatggggtatttgttttatgatctttcattccgttttcgctaacttaatttctggatacctttagtatattaagttaattcggattattgagattctttcttgttaacattagtcatatgatatatatataattcgactcaagtacattttaatttcatttcaacacaaattaaaactgtttattgggtttttcaaaatctttatagaacaagaaaaacaatttatttattttattgttttaattccatctttaacactgtttatcactctctatgatcaggctctataatcacaagtacaaaatcccaaaaagaaaataacctgaa

SEQ ID NO: 600 - DNA, 1472 bp, Cicer arietinum
  source 1..1472: mol_type = unassigned DNA
gccatgtggcgaacggagagatggcccgcaataagcgaaccccttcctatactccctcaccacacaccactctctctattattctttttgtttggtcataaatagcgtgtgtcaatattctgctcaagatattcttcatcatatcatataatcatctcccactatatgttcattatttattaacattattatatataattcaatcaaaatttattattatatcgccggttctgcatacatatattttatactgcaaagggctcagactttacaattttaattttcatatatacacattattaataatagccactcgctatgtagcgctctcttaataattaatttttttttttcatagaccacttttaatttctaactatattaaatatagaattatcttcaaggataaatttataaaatcaactgtaatagttaataaatttaggattacatatttttctctaatttttatggagaaatatgtttatagtgtctaaaatatttgtgtaaaaaattattcaaaattttaaatgatatacattagttgacttaaaaacagaattagaattatgaataaaaaatattgtggaaattaatgatcgaagaaaattaatttatagtgattagaaataaaattttaaaatttaataagactaaaaacatatttgagccataaatttaaattgatatgaaatttgttaaatttagtattttagtttggaaaaattggatatatattaaaaaaaaaaagtagtaaaaggtagggagacagagatgcggaagttactatagtaggagtagcattttgtaggcttgggcaacattcaattcaacggcaagaataatatacctattcgtgtctctttctttgattgagtttggatgatatatagtatatttagttcatatatgcatgtgttgctctcagcacgagtggtgtatgtatgtaaatgttaatgttatagaagaagcagtaagcacatattgtactgtacacacgcactctaataattaataatgaattaatttacagcgctgctaattgtgaaagagaatataaatatattaaatatagatattgtccagtctcttattttgcttcctagtgggtccaactgtaatataagaaattaaatatgcagttgtagtcattaaataggagacttgttgattgcatatgttcatttcatctcatattttgtgtagaaagaaactcttgtactaattaagttattaattaacgacctgcttcattcattcattcattcatcattctcttctgctccgcctgcagccacacacacacacatcattactgacctaatttcaattccttgatactatacgtgtcctcaactaactacttgataattctgtaatttcccttcctctctctctctctctttctctctttctaatatatatatatcttattttcttacactagtgaacataattaaagtataggatcg

SEQ ID NO: 601 - DNA, 2784 bp, Cercocarpus sp.
  source 1..2784: mol_type = unassigned DNA
gccacgtggatgatcaaattgcttaatctaattaataccatttttaattgaaatatctatttcaaaatcaatcaataatagatgaagaggtcttgaaagtaatatattgagatataagagctataatacccaatgtgagttttatattctcaacacattctaacacatatttagtcggcatggagcacgtgtgacaaaaattgaactagcttgcacattaaaaatgaattatctgctataatattatgttgaacttcgagttatatatctaattcaaactcaattaataatgagtaaaaagacctaaaattatatgtaatatatattaacattaagatcaatttagaacgtttgatgaatcaattatattagataatgtggaaatttgacatatatatattaattgtccgaaatattaccatgttcaaaattgaaatatcttatccaaaactaattaataatggtgaaacaaaaaacaaaaatgatgaacatgttctaaattccatacttattttgagataatatatgtgtctatattagctagcttattgggtacatgaaaaatcaaattcctgagttaatttagaacctcccatctacaatcccaggttggtttaaatatttcccattcgagcaggccctaattaacaagcaaaacctgtctcatggagtataggttaagatgaaaaaaccaaaaatggttctttagatcacatgagaatcttttttttttttggccaaagatcacatgagaatctttaaacaaagggaactcaccaatagtatgccaagtgtctcatccaaaaaggtcccaaataataaaaagctaaaaatcatataataccaagcaaaggttaaaaatgatgggttttattaaatgctgtctaggaatctcctgtttactcaccaatagaacagtaagaatcttttttttacagtcttcaattaaaaatgaaaaataataaaataataataaaacccttttcacaactttccacttgcaaataaagaaatggcattaatgctatcaatgcaacaacgcagaggcttcatatgtttgattttgaggttaattaagtaattttcttttcttaaataatggaaatatttagagaggcatcgttttcactgatggcgtgcaagtgtgtatgtagagagtacactacacagtacacacagtgtgtcactttaaaatacatcaagagaatatgtaggatgagtgtccatctgacatgtgtcgcatagataatgcaaataacccgcatacactagtgagagactgtatgtgtgtgcgcgcgcgcatgtgactcagagtgagctcctgtgcataaaaacaaagatgtagattcgaaagctcccacatcaaaatattcaaaaaataattttaaaaataattttaatttgcttcttggtgattttccaaaactactatactctttctgttttttcactcactaatttactcattcactcattcccattttataaatatttgtatttgtatgtacgcgtgcttgtttattactcaaatggtcaattttttttttaatatttgtatttgtgtgtgtgcgcgtgtgagtgtgagtgtgtgcgtgtgagtaacaactcaaacacgcactggtacgtgctagtgctactacaaataggtaaggttgattcctcatttgctaaccttaagactactcgagtacagttgactgccagaacaaaacataactggaattgaaaggatgcatgattggaagatgagattggaatatgatggactcgccttgacatagtatacatgtgtttccctttatttgttttattattttatttatcgtgggtccaacttaaataagagattctttttcagtttgtttaaggtttctttggttcttaaataggagattcttcacttcacacgttctggctcaaaagaattagatacccaagaaaccaagagctgcaggaagagaaacaagagaactgaggaggataaatagtaagcccgttttgagagacttgagagagaagaaaccattcaaccaattccttttgtggatgtgagagagacctaattccatatcttcaggcaaagtagacacatatatgccaaactgagatcattttccttggaatctatctgaattcacacagtgagtgacatatcacattcttttctttctcctttctttctatatatggccagtttccatgtattgaaaatgttggtgtgggttttgatttaagtttctacaaatgggacttgctatgtctgcatctttctttgagcaaaaattaatcaaccagtttcttgacatcataaaaaaattggataaccatatgaactatgatatgggctcctgattttctcagacttatgaatcctgacatcaatcggggattgatatatttgggttttacattgaaatcttgctttgttaattgtcatgagtgcaatttgaacccaggctgatgtaacttctggaccaataaagaaaaaaaaaatccttatagagttgacaaaagttttaaattttacattgtaaataaaagatcgtgtgtttgtgtgtatgacagtatgagtcttcatgtttgtggtctatatgaagctgtagtaagtttgttggtctgaaatgcatttgtatatggggaaaaggaataaaacttgttggaaaagttgctgttttgtttttcatctctactcttctgggtcttgacagtgtttgcaattgggttgtagattgtaagaggctgctgatctacgagaaacttgaagaagaaaaactcatcatcact

SEQ ID NO: 602 - DNA, 2321 bp, Casuarina glauca
  misc_feature 1439: note = n = A,T,C or G
  source 1..2321: mol_type = unassigned DNA
tccagttgaatttcgtatgatagttcatttattaccagcaacaaactcatcaagtacttgtttttttttttttgcatcggatcaacttggttgatatttcctatgagacatacttaaaaattacttagatactttaatatacaataagtgcttcataacgaatggatatagtttaacatcgaagtattagatttgtgatcagcacttggaacaatgataaactaaagtttatggtaatgacagaatcataaaaaatatagaatgattaaatcaactagttaaacaaaagaaagtgaaaataaagtaatggaaggaatgcaaagcaagctggcagaatataattgaaaagatatgaagggagaaggaacaatgaggaaatttcttctttcctttgggaatgggtaaagatggatttcgaattataattttcttaattacacattaactacagaaaatgcatatcttgatatccctttgatatttattcaattatatactctttacgccgcattaatcttcgatttctgtttcccttacgtcacacaatgcaatactatttttattttatttttaatatggtccttgttctctaggaggtcttattctatttattggtttatttttatagaaaatattcacttaagaagatgcttaatcggctgccactaaccattaagccgtcctaggaaagaacacaaaagaggatctaagacaagcaaacagttttggtaagcggggaccctacaagaataacattatttcggagtgaatatgcatagaatggaagcttgattgaaagttaaaccatgcacaacaaccaagttcgacaggacaatccatggatgatcttcaccaatcacattttcacgtttgaaatgaggcccaaacaacaacccaacctgacttaaatcgacaactcaagttaagaaagattggtttcggaattcataagaatctttctgtcaatggagccaccaataagaaagggaagaatcattttccttaggtcaagttgcatataaacaaatgcagaaaccctctacttacctttccaaaaatgacataatggaacccaagactcatccctttcactgtttcgtgcccgagtacgcagytccccacgattgcctgcattggacgtgcaccaaacaagctccatgcgacatgtggcgtgctcacagaagatcaacggactctgtccaatgcttccgaggaaccarcttctataaatggagaacggctgtaccgggaatcacagcgttctaacatccctttattcatatgtcatacagaatatatatcagtctctatctattacgttcaattctgaatgggaagctgaactcggagtttgacaaagagcatatattgttgactttacaggaaatatgcgtatggccgacgatgaagatgggttgtgaatgagctactctttaacnttttttttttggtggtcctgatgaacaggagatcatcctttctcttcattttttaatgaattttgggacgttaaatagtaggagattctcgagacacacagccatagtttgaggaaatagtacaatccacaaccagaggtgccaaaactcgaagaacagcatatttccctttgcacgaggcaaagaattagcagcgattctttcttcattccagcaaatctttgctgttgawctgttgctgcttttcacacagcgagggatctatagaagctgccacgctcaaagaaagtgagattttgaagaatttcgacaaagtaatgtaagttgctctctcatctttttccttctcctcgtcaccttttttggtttctgtatcttcctcgcataggaaggacatcgagtacgaatgttaaggtttttcagaaagtgagtacgtatttctttattcttttctcttcttttggtttcatgttttcgtctgtatcttgtttcttataaaatctactatcacagtcatgtagtagaatttttctcgaacaaaatttaaacccttccgcatgaatttttaatccaagttgmttcaggactagtcgagagatactttacagaagcctgtcaacaagyttcgaatatatgaaagttttcaagagaattgcataactttttctatgattgttctatggaactgcagtagcttttttctgccctgaaatgcacttgccattgtcaattcacaaagcaatttttgttgacgatgtttctgggatttggacagattggagttctggatacaagcaagaagagtactgccaggaagttcctgttcttgttttcatctttacgtgtatcgggtcgtgaatcgctgcaaagcctttgtcagac

SEQ ID NO: 603 - DNA, 1407 bp, Cajanus cajan
  source 1..1407: mol_type = unassigned DNA
gccatgtggcgcacagagaggtattccgcatgaggtctcctcctactctactcctctctcttcatacttgatattctttttgttttgttttggtcacaagtcataacttgtatctatattctctgctctagattcctcatcgtaatgatctcccactattatacagccggttatgcataggtataattaattatagatgcaaattacaaaacgggtgccatcgttactgggctcaacagacatccccaacactcccattacttttttataataaaataaccttactaattgtttcttttataactataatatttatattaagcatttatttaaagaagacacacaccatccctatatctattaatttaatatcgagtggcaaaataaataaaaaaaatctttgatttgattttgtgtaagattttaaattagatttaagtaataccatttgaaaggagtaataataaaaatgaaataagatgcttaacccaggagaaattatgacttaatgaataaaagaaatgtaaacatgtccttaattatttaagagtaaaaacttaaatttataacatactaataatatagttttttattaaaaaaaataattttaattaacttatagaaataataaaatggaatttttattttgaatttgttgaaaatatgtaattataataaaatattgaatagattttaattaaaaatagttagttttaaaaattgtgaaacaaagatatatagttttgtatgtctctttctgtgtttctttcagtcccccactgatttgaattgatctttctatgttgctttcagcatgagaagtagttgatgggttaaaattttgcggtgttgtttgtaatagaggtagcagctaatagcatataccagtgtactgtagagtacatgaatatatatataaaaaaaaatagtaaataccggcgagtgggcacgctgggagtgaggggccccactgaaatagaagaaaggtttccttttgtggcgattatataagagagttgtggatgggtggcatgttgagttgagataataattttctcacgtatcacttttctacatacatagctcacagtcacagctttggtttgtttccgagagtaagtgtgttttaattaattttgtgtgtgaactttgtgtgggtaattaatggtatacttatgtgtttgttgtaaaattataggattgatatcagtgggcatgggatacgatgcgtatgcgtttggggaagtgggagaagaagatatgattgaggagctgctggtagaaggttgctgggtggaaaggagtgggaagagatggtggattaatccgaatcctgggtcggtgaaagagagagtggtggttgcggtggggtacctgagagaatacaggaagaacgggaatgaggtg

SEQ ID NO: 604 - DNA, 1114 bp, Arachis ipaensis
  source 1..1114: mol_type = unassigned DNA
cgccatgtggctcacgacgagggaacccgcaggaggtgagtccccacctacttgtacctataatattctttttgcttcggtcataatatgtcgccctagattctactgtacaatcttcttcgcaatgataattattaatgctctctcagtctgatttgctaattggaatctttttttatataaattttttaattaataattttaaaatgtgttttcattgtataaataagctaaatcttatttaaaaatatttaaattatattatgtatgtatatattttttaattattttttatattaattaaaaaatgaaaatcttattattgtgctgccgctcccacacacatatattgataattgatatatagagattagtggtgttacatgcatacatcaataggctcaatttagatatacatcccgtagtgtcttgcactttgtaccccaaattcattctgttacgggagaaataatatacctttctgtctctttcagcctttctttgaatccgctcagctcattgaattaacttgatatttacatgttgctctcagcatgagtattacgtgtgatgtgttgtttgttacacaataagcagcagcaacaaccaatattataagtttataaattatatatgatatgatgtattttgttttaaagaaaggaatataatgataatttacagcaccggtaatttatatatatagttgccacgccgaaggagacgagaggtagagttgaggccctactcatgccaacttccatattccttttgtttactggtgggtcctacacaattagaaggaattttccgtttatggccattgaatttaaatactcccccatctcatcttcatagtaagtactcatcatcatccactttagtcttgagagatatatatcaacaacgtacgaggctcctcttctttccactcctccgatcccacgtcccttcaagtagagcaaccatatttaattaactaatatcatttacctgccacacaatctcaaaggtgtgtatgtttcttgatttcattctacatgtgtgtggttgaataatacttggctaattcatataatgcaacgtaataaataacaggagaatatagaacaag

SEQ ID NO: 605 - DNA, 3959 bp, Alnus glutinosa
  misc_feature 712: note = n = A,T,C or G
  source 1..3959: mol_type = unassigned DNA
cccagctggcatgcacccgaccttcggcccacatcacactccctccccttacacctcttattctctacatgccttcatacccttcatcttcttccccacgcgccttcacatattttgtctctctccccacgtacattttccttttgttctcttttgctcctctccttagcattgagcgacgagcgaatgtataaaaaatgagatcagccttgcgagagacagatcaacggatccaaaatcttttgcatggagagagagagagagagagagagagagagttattagtattaaaaaatattattcaaatagagtagataaaaaatttagataagcagatccatgatacttttgaaaagagcattgctaaaatagaaaggaatgataaatacaaaattagtttacgtagttgttttaatttgcaattaggtccttgtcgtataaaagttagttgagaattttcggtggaagcaaggaaagcaaataaggtgtgtctactctcaacttccatccaaaatcttgatgaaatcccttaatgtaccatattgtcaaatccaatcatattatgaaatgtgtcacccacaactaaagaatattaaaaaaataaataaaaaaatcaggaggtggtctagccacccattttggccaagtgaaggtggccgaaccacctctaaagctatggaaaaaatgactatataagggggtggctgaaacngaaccacctctaaagctatggaaaaaatgactatataagggggtggctgaaaccaccaacaattactattttggggtggctaaaccacttctaatggccatgagggtaacagaaccacctccatatatgcttagaggaggtgcatggcagaaccacccctatcgctattatgaatagttcggccacccccaaatggccaaactaccccaatgagcatttagtcatttagggtggccaaaccacatacaccctcaatagcctactatcaaatggctattttggtggtctggccacccctattttttttttcatatttatattttgtatttttataatttttattgtgggtgatacgtgtcataatatgattgaatctgtcataacacattaaaggattccgtcaagattttgggtgaaagttaatttttaattttttttaaacgaaagttgagagtagagacctattaatttattgttttattttttcttacaacaaagagttttcagccaatttttatatgacactttgacaatgagctaattgcaaaatggtgcaaccacaataaataaattttatatttatccctaaaaaaaaaaaaaatagaatttcctatctaaaatgttttaggggatacataagcagacgctaatgctctttaaaataaaattaaaaaattaagaaaagaaaaagaaaaaaagaaaagaaaaagatcgagttttagacaaacccaaaactcacttttagaatgatgaaggtgtttttggttttgagattccttctctctgtacggcacagttatctttatggttaattcgtttcaccttctcttgatctaacaaattttttattttttattttttttaatggagaaagatgcttttcaaattgcaaagatatctctcttaatctttatttaatgtcatttgtttccttaattatacattgaccattgtaaatgcatgcctcccctgatattctattgatatttatttaattcaatatttttcactcaattacactctgatcattaattattctccttatgttaccttataatgtaattaatcattcttatgtcattattagttaaatagtattatttttatgctttttttattttttaggtggctttttaatgttatttttaagaactttatcttttaagggtcttttaatattaatttttaagaaactttatttattacaaggcctaagcgagacagcctgatcgaattgcctaagcattgagccgtcctgcatagaacacgctcctgcaataaaaaataaaaataaaaaataaatctaagacatgaaaatgattttcttgagtagggacccaacagaataatattataatttgttggagtcataacataaaattcttaaatattttgataaccctacctaatatacagggttctaattagaccaatcggtatcaatattgtttgttttaaaaatatacgtttagcctgcaaaattacgggacaaacacactctaaaccaagtttttttttacaaattcaaatcataacataaaatttttaaatattttgataaggctgcataatattcaaggttttagaccaatcgatatcaatagtttaaaaatacacgtttagcctgcaaaaaaataggagacaaatgcactctagacccaacacattaaccaagtttatctatggagggtaatcaccaatgaaaattcacacttcaaatgaggcccaaacaacaatctaacctgacttaattacaacccaaaaatataacaaaaattgattaagatattggtaagaatctttctagtcaatggacccaccaataagagaggcaaaaatcattttcccaccgtctagttgcaaataaaaaaatgcaaattacagtgcctttctttccaaaaaagatattaatcgaaggtaagactcatccttttcactgttacgtgcacgtgtacgcagttacttaccgattgaatgcagtggaagcgcatgcaccaaacaagctccatgcgacatctggcgggcacacagcagatcaacaggccgagtccaatgttgccatgaacagaaaatactataaatttagaacatgggtgtacggggaatcaaagcatttaacgtagctgatcattcacatgtcatacatattgtatactatgtaactactgtcgatcggtctctgtctattgaataggaaactgatcaactcggagtttgacaaagagcatgaattgttgactttacagcaaatatacgtatgtgggtcgatgatgatgatgatgaagaagatggcatgtaaatcatgagcttttgttaattttaattttaattttttttttttggtggtcctgctaaacaggagactctcctttctttgggtattctttaatggtttttggggcgttaaatagtaggagattcttgagacacgcaccggcataacttgaggcaatagtagaatcccacgactatagagagcggtgccaaaacttgcagaaacagcatatttcctttaccacaaggcagttcttcattccagcaaatctttgcttcatgatctcttgcttcttttaacacagcgagacatatatatatatacatatatccatggtactagtggagatgctcaacaaagtgagatttacaagaatttcaacaaagtaatgtgagttgctttagatctctctgatatatatatatatatcctcctccattttgtcaatttaatttgtttccatatcttcttcacataaccgtgacaagacatatatcatcaagtacggatatttagtttcagagaatgagaagtactactacgtatatttctttattcttttttcttcttttgtttcatgttttcgtctgtatatatatatatatccttattacttacaaaatctaccatcacagtcatatttttgaatcctgacatgacagcaaagttaccaattttgcttttggattaatgggtttgtgctttctagccttttaaaaaaaaaagcttcaaattttcaagcaaattatacaactttttttttttttttttttcctgaaatgcacttgtgattgcagttcaaaaaacaatttttgttgacgatgtttctgggactcggacagattgggcttttggatacaggcaaaaggatcaagttcttcttcttccttcatctctacgtgtatcgggtcgtgaatctttgcaaaggctctgtcagaatatcatatggaaatcgaaaggaagctcatgaac

SEQ ID NO: 606 - protein, 48 aa, Glycine max
IQIWVPLRRSAGQELGTDESDTIAFERNRNVKLRLFRSQEGCVGVPVL

SEQ ID NO: 607 - protein, 109 aa, Mimosa pudica
LQIWVPTRREDDPSCNNKNLENYYRNVSKVYNHHHQLAGEEESAEDQCRVFLGKLPDHHQHQWAPPASVRFFKSHEYVAYVNNFAPHVHHHHNQQHYDMLRGSLALPVF

SEQ ID NO: 608 - protein, 63 aa, Cicer arietinum
IQIWVPLRRRSGLFHNQYHNPNPVHESLPISVPNSNVQVRFFRSHEYPRVQAHHGSLLALPVF

SEQ ID NO: 609 - protein, 80 aa, Vigna unguiculata
IQVWVPARRGCEAGIHHHQDYPYTLDYTNSNNGDATTPFPFQEEWLSHHCPPNIRFLRTHDYSRLHHYDLRPGSLALPVF

SEQ ID NO: 610 - protein, 81 aa, Phaseolus vulgaris
IQVWVPARRGCAVGIHQDSYTTLDYTNITNNNNGDATRVFQFQEEWLSDHWTPNIRFLRTHDYSRVQQYDLRAGSLSLPVF

SEQ ID NO: 611 - protein, 55 aa, Lupinus angustifolius
IQIWVPQRSNSRLPPFEFNHDHLVTPTNVKFFRNQQVHHQLQQYDVRGCLTLPVF

SEQ ID NO: 612 - protein, 87 aa, Cajanus cajand
MQIWVPERGGGGGGGGVGPGPDESVWGGYPMNMNMNMNMNMNMNMNMNMNMNMNMMNRSIRVGFLRWEEGVPYGYEEGPGWMGLPVL

SEQ ID NO: 613 - protein, 67 aa, Arachis ipaensis
IQIWVPPRRSPLPLPLPLPLDVLAFPNPSPNPNPNLCVRFLRSHEYSHHYQAQQHYDLRGSIALPVF

SEQ ID NO: 614 - protein, 67 aa, Arachis duranensis
IQIWVPPRRSPLPLPLPLPLDVLTFPNPSPNPNPNLCVRFLRSHEYSHHYQAQQHYDLRGSIALPVF

SEQ ID NO: 615 - protein, 101 aa, Unidentified
IQIWVPINNKAGRKILTTSDLPFSLETRCPNLAKYREISEKYQFSAEEDCKVLVAGLPGRVFIDKVPEWTPDVRFFRSDEYPRVDHAQEYDVRGTLALPVF

SEQ ID NO: 616 - protein, 66 aa, Medicago truncatula
IQIWVPMRRRSALIHTQNHYLQQESSSAPVSVNPNMNVHVRFFRSHDYPRHQQQQQYGSLLALPVF

SEQ ID NO: 617 - protein, 84 aa, Lotus japonicus
IQIWVPLRRGILHDHDYHTNYLLSNNPPPQPEAAADHESVSLGFPMPAAPNSNLYSNVHVRFFRSHEYPRVQAQQYGSLALPVF

SEQ ID NO: 618 - protein, 99 aa, Solanum lycopersicum
IQIWVPVNRGGKHVLITNNQPYFLNPNSHSLLQYRNVSQNYQFAADKDSNELVGLPGRVFLKKLPEWTPDVRFFKSEEYPRVNYAHQHNVRGSIAVPVF

SEQ ID NO: 619 - protein, 99 aa, Ricinus communis
VQIWVPTKKEGKRVLTTFDQPCFLSLNSESLANYRYVSETYHFSVEGDSKDFLGLPGRVFLRKLPESTPDVRFFRREEYPRKSYAKQYNISGSLAVPVF

SEQ ID NO: 620 - protein, 99 aa, Datisca glomerata
IQIWVPARSKGSQQDVTTNYRKIIPGDNYHLGGGDEENWQEIGGVGYGYGYGLPCRGMMGKNMQDQWGFDVRFIRKDEYMRFSYGQQVDVRGCLALPVF

SEQ ID NO: 621 - protein, 99 aa, Datisca glomerata
IQMWMPVRRGDKLVLTTHDQPYLLEPSCVSLANYRKVLSGYEFAAEEEGEESVGLAGRAYVGKLPEWTPDVRYFKRHEYPLIRYAEEYNVRGSLALPVF

SEQ ID NO: 622 - protein, 99 aa, Casuarina glauca
IQIWVPIRRGGSYFLTTQDQPYYFGANCKNLANYRNVSKAYQFAVEEDMEESAGLPGRVFLGKLPEWTPDVRFFKKDEYPRINYAQQYDVRGSLALPVF

SEQ ID NO: 623 - protein, 91 aa, Casuarina glauca
LQLWVPVRRGGSRYFLTSQDQPYYRNVCRAYQFAVEEDMEESGGLPGRVFMGKLPDQWTPPDVRFFKRDEYPRINYAQQYDVRGSLALPVF

SEQ ID NO: 624 - protein, 99 aa, Parasponia rugosa
IQIWVPIRRGGRQILTTYDQPYSLDPNCKSLASYRMVSREYQFLCEEDSAESVGLPSQAFLGKLPEWTPDVRYFRSYEYPRINYAKQYNVRGSLALPIF

SEQ ID NO: 625 - protein, 99 aa, Discaria sp.
IQIWVPIRRGGRQMLTTCNQPYSLNPDCKSLANYRAVSSGYHLLTEEDSGESVGLPGRTFLGKLPDWTPDVRFFRSYEYPRVSYAQQYDVRGSLALPIF

SEQ ID NO: 626 - protein, 99 aa, Ceanothus sp.
IQIWVPIKRGGRQMLTTYDQPYSLNPNCKSLANYRAVSSGYQLLTEEDSAESVGLPGRTFLGKLPDWTPDVRFFRSYEYPRVNYAQQYDVRGSLALPIF

SEQ ID NO: 627 - protein, 99 aa, Prunus persica
IQIWVPIKRGGRQYLTTHDQPFSLDPNSKSLAGYRNVSKDYQFITEEDSAESVGLPSRAFLGKLLEWTPDVRFFRSYEYPRIDYAQQYDVRDSLALPIF

SEQ ID NO: 628 - protein, 99 aa, Prunus sp.
IQIWVPIKRGGKQYLTTHDQPFTLDPNCKSLAGYRNVSKDYQLITDEDSAESVGLPGRAFLGKLPEWTPDVRFFRSYEYPRIEYAQQYDVRGSLALPIF

SEQ ID NO: 629 - protein, 99 aa, Dryas drummondii
IQIWVPIKRGGRQYLTTHDQPFSLDPNCKSLAGYRNVSKDYQFITDEDSAESVGLPGRAFLEKLPEWTPDVRFFRSYEYPRIEYAQQYDVRGSLALPIF

SEQ ID NO: 630 - protein, 99 aa, Cercocarpus sp.
IQIWVPIKRGGRQYLTTQDQPFSLDPNSKSLAGYRNVSKDYQFITDEDSAESVGLPGRAFLGKLPEWTPDVRFFRSYEYPRIEYAQQYHVRGSLALPIF

SEQ ID NO: 631 - protein, 85 aa, synthetic construct
  REGION 1..85: note = Consensus sequence
IQIWVPIRRGGRQXLTTHDQPYSLXRVSKYQXTEEDSESVGLPGRFLGKLPEWTPDVRFFRSHEYPRINYAQQYDVRGSLALPVF

SEQ ID NO: 632 - DNA, 21 bp, synthetic construct
  misc_feature 1..21: note = Synthetic Construct
  source 1..21: mol_type = other DNA
ggaatggaagctgctggaatc

SEQ ID NO: 633 - DNA, 20 bp, synthetic construct
  misc_feature 1..20: note = Synthetic Construct
  source 1..20: mol_type = other DNA
ggtctgcaatacctgggaac

SEQ ID NO: 634 - DNA, 27 bp, synthetic construct
  misc_feature 1..27: note = Synthetic Construct
  source 1..27: mol_type = other DNA
ggttagaggtaacagactcatccattc

SEQ ID NO: 635 - DNA, 27 bp, synthetic construct
  misc_feature 1..27: note = Synthetic Construct
  source 1..27: mol_type = other DNA
caggatcttcatgatcttggtagattg

SEQ ID NO: 636 - DNA, 29 bp, synthetic construct
  misc_feature 1..29: note = Synthetic Construct
  source 1..29: mol_type = other DNA
caaggacgttggatggattcctcaaatgg

SEQ ID NO: 637 - DNA, 26 bp, synthetic construct
  misc_feature 1..26: note = Synthetic Construct
  source 1..26: mol_type = other DNA
cgtgattggcctgatcttcttcgtag

SEQ ID NO: 638 - DNA, 1317 bp, synthetic construct
  source 1..1317: mol_type = other DNA
ggacatgagattgaagctccaaaattagctcttttttctgatgaatacttaatgctttgttgtattcacttgattaagtgctagaaatcatctttgcatgatcatagattaaatgaatttccagttggtgtgtggagagctattttgttatgctgacatctgcaatttgcagggcatctaatgattgtcatttcttaaattattattggttgtttccgtttctttaattatctgttttaatcttgcaggtcatacaaattaaaatactagccaccacccaagacatactaaatggggtagtagagggaagggtaaggtcgataaggatgactttttattctataaaatttaggagaatttgagcttaagtggcaaggcaaacgacattactatacgaattggctttgtaccagaaacagggaacaaataatattttacaaataagctattatcatgtcagctcatttgttcaactttgatttgattaaaaattaaatgaagttgaatttgttgagctgctttattatatatgccactggatgtttccgcattctaagtgcatgtttgaaaacatttctacaattgattacgaaggaaaaattaatcatggagagaagcttatgtgcgtagcttctgtatttctgaattgattctatctgtacagtagcatttagataatgaatgatcttggttctcgctaagcatcaaaccaatctctacccttttaaaattgcaagaattataagtcatgcattgacccaaatccttctgtggttatgccccttaaaaatccggcaagacatcaagttagttggtcattagggttccaccagctagctgacaccttgtacaacaactggccgtcctaaagttgggtaagcattacaatactaaatgccattttattatattttgcgcatggttatatacctaagtaggatttgtccacagtttctttgattcggaaaggaaaaaatatttagttgacactgacagaagcagattttatatacatatattatgaaatgactcctacatgagatacacgaatctcatccccatgagttgcagtttgacagagtacacacttatcaacttgctggaatataggaaagtctaaccaatgatgtcgatccgtattgccttaattttggtaaatttagtattacatgatcattattgatatactaaaccacaggatattttattgacaatgtgaatgttccatattttcaacaatgctgattccctctgataaagaacaagttccttttctctttccctgttaactatcatttgttccccacttcacaaaca

SEQ ID NO: 639 - DNA, 1135 bp, synthetic construct
  source 1..1135: mol_type = other DNA
cgatccttcgttgtattcacttggtcaagtgcaagaaatcatctttacacaatcatataatgaatggacctttggttgatgtgttgagagctacattcagtcctctgctgacttctgcaacttgaggggaatctaatgattgtcttattgcaattaacaattccttttaattttttgacagaaagagttggttacaaaatctcatctaacatattgttgagttcctcttttttttttttttttttttttttgataaaagggtacatctgttcgcagctctgaagattaatccctcgaatagggttggataacatgaacgacaaatttgtttcttaagagttttaacactgtcatattcttatggcagaattcgaactcgaacccactggttaagctagaagtaagaagtgacccatgccatctcattcaatcgttcttggcttgttttcggtttagatgaatatgaagtacaaaaagctacgctcaagcaaaggagagcaggtaagaagggcatcttatttttttaatatattagatgtcaagcttacgtggcgatgtaaacactgtttctatccgaattagctatgtactagaaatagggaacaaataatataaatggtgagtttgtcaaggtgttttaatatattgaaaccaatgtaactggaagtgtcaacattgaaagctgttcattgcctgtattatattataattgcatatatataatggcattagcctttgttaaacgttaaaccatatcttttgctagtttgccccttaaaaatttggtaaaggcatcaagttagatggtctttaggtaccagccagctagttgacatcgtgtatggacaccaaattgggttataataccatattattcttaccatctttattatattctgcgcatgatttcatacttgtttgggatttgccaacagtgtctaagatttgaaaaagaaaaatagtagaactaatgacagagacatcagcatatatttttaatatcaaaccaaaagatatttgatgtccaaagaagagataaatataaagttagaagtatgacaataagtcttggttgttatttgccataagaaactctcttttctcttcccctcataatttgcatttcctcacaaca

SEQ ID NO: 640 - DNA, 2496 bp, synthetic construct
  source 1..2496: mol_type = other DNA
tcgactatataaggggttcctccatacctaataagacatgtttgtttcatgtcgatctacttactctattttatggttttctcgtgagcaatttacatataaaatacacattaaattgcacccaataactaactagttacaagattagagcacataaatcatggaatgaaacaatagcctatgacttgggtattcggtccacaacatctctagaagttcgtacaacaacgatcaaagagaaagtactgactagtgatatgagaaatttggtcaggaacaatgggctggacacattacgaacttgagcctgaatagtagcagcatatgtctgccttcgcaatgacgaagaaggttggacggagctaaagttaaagctggaagggtgtgtcgtggcatttgaaatttagggttcaactgtagctttgtttgtctaactacccttctagctttaataaaaaaacgtaaatcaattaattaaagagaaatcacgccaacctgtctcaaacccgctctaacttgttggttaaggttatgtgttgtatttcaatttgcttgttgcttcaacttgactccttacctcctttcatgttttttcttgaaaattgtgtaaactcagttttttttttttgagaatgtatgagaatgtgatacaaattaaaatacaaacatacattgaatgagcggggctaaaatgactcaaggtacatatgagttaagtttttaccaacccatctctttgatgagttgggtttaattgggttagctcacgtgttaactatttcgacaattctaactttttggaataatgccatccaaccctaggtaaaactcaacatgacttctcttaaagaaatgaagagtgaaagtctacataaatcttaaacacttaaaacactacaacttggtagatcattaaaatatgctccagaaataccataatacttgaaaataaataatttataaatgtaaaatataaatttgttgctgcacccaagtctgagtgaggaatgaataaagataaataaaatatatatatgcgttgatactaacatatgatatgatgtgatagatgtcatatataatgaacagaatgatagaaattgttgagcgcatggaagcttcttgttcaataattcaagagctgcttgtggagggctgctgcagggttgttatggatgcaattatcaaatatcttgctggaaattgatccaaaagttgactattaccttatcaatgtccggtgtccttcaagccaccattcaattagtcaataaccttttgtttttgtttttttataattttggtgccaaataattttaaccatttatttttatcatatatattatataagatggcaagtctataatcatttaaaattaaattagtctaaatttttctaatatgctgtataaatttattatatataagaataaataatattaaaaatattgtttaattgctaccagttcaatcattaattaactattgactgaaaagaaaaatgtctaacaaattttgttacattctgtttgttttgagaaaaaaaaaattgtttttcattttctgaaaatatttatttttaaatttattaaatttagaaattatgtttgtttttacgctttgttttcatcttcaccgtcaccaccatcgctaccactgtcgtcactattactatataccactaccatcgttgttgccgttgtcattgtcaacaccattgctgtcgtcgttgttattatcgccccacaaccactatcatcatcactgctatcgtcatagctaccacgaacaccaccatcacttttcattgaaaatgaaaaatgtttatttatttattttgattatattttaaaaaatatttttaatcaaccaaatttctttttaactttttttttcttatgaaaaaaaataatatgaaaagaacaaaccaaacagatccttatattcttgtttccattctttatcacccatgagagtagctgtagcgcgttaactttctaatagaggcgggaatttaccgttaaccgttgggtcatcactcagcttactgagtcatcttcttcctactgtaggcggaacccacacgccactgcctctctattattacatcaaattctattttttttacatcatcatcaagataaataaattgcattattcagaaattaattcctgaatctccctatcttaactcaggtgtctctagctattaccacttaagctattattagaagtctacgtcaaattctataataaacacatattcttattcttattattatactaatacaaaccttgatttgaagccaaaaatgataaaacaattgcagactcgttcaaacaacagacaacatgtaccattaaattccaccccaaattctcaaagcaaattctgaattctccaactagtttccattctcctagtcaactcaactcaaaacccagatgagaatgagataattccaactttaacaaacacacacaattcatcattca

SEQ ID NO: 641 - DNA, 2000 bp, synthetic construct
  source 1..2000: mol_type = other DNA
aaataatgtgtctaaaattaacaaagatattttatggttaatttattgagcttagttaaagtcattttctaaaacgagacattgtagttgttagataaataatttcctttaattttcatcaaagtttgtaaataattatagggcaggacacatatgtccatcaattgatatatatatatcttttgtaataacgatcttatagaagaatcaatatctacaaagaaagttatcacttgtctcaaattatgctttatgcaactggtattgtcatgtagattccattttggtttatatgatattgaagtcaacgaatcacagctgcttaggcgtggttcataatttaaaattgaaactatggtgtttgttggaattatgagaggacagactgtgaagtggttgcacagctaccgacagggttgccattactgatgcaaaggattaaacaatagaacattttcaatcaacttaatctatgtttgacatcacgctcgatgtgtcagaatcacgacgacccactgtaatttttaaaaaaattacattttataatttttgtagaatcacggtgtatcacagtgattttgacatacccactgtaataccaaacatgcacttgcattctttcttccgtttgatgccaaaaatggtattgtttataatacacttaaaataattcatatccaagttgttgtataaaaaaataaacaatgtgatttcccaaaaaaaaaaaataataagtgattggcatgcaacatcagattttgttgtccaagtggtcacatttgaaatatttgagtttacatttttctcactaatatctttatattgaacttcaatctgtctagctataatcaaatggttgactaaaatggttaataagcttcaattaaattcaaattatttgaaagaacttgaatttaaatcttaacttgaacataaccccgaagtggatgatttacccaaaaaaattacctaactactctaataatcattttaacaataagagtattttactcaaagaaatttatataatcacaaaatcctagtatactcaatgattttcttaaaaaactattataaccagaaatgacaatatgagacaaatataattattttaataaaaatatctaaattagaattatttgaaaatgtaaaactatattattttttgtagttttccaaactttattaagcatcgtttaattgcacacaaaatttactccaattttttttagtctctgaaagttgctttttggtccatgttttagttttggtaattataattaagtttgttcatattaattagttctaatgtgtgtactatatagatcatactaattttgttcccaaactcatcttagttaggatctttgtatctactataagattaatccttgtgccgatataagaatatttgtcatgttatcaactatcacaatattgtattggtgagatcatataagatttgatgtcaacatcttcgtaaaggtgtcagattcgattctccccggtatcaatttaagtgagctaatttagcttcttaaaaaataaaatcaaacaacttttacataaactcagtgaaaacttggatataaagtatccttatactactctttagtcttgattagtctctgcaaagatatttatatgtactttgtattatcataagaacattcattgacattttaagttaatgaattactaacatgtcaactcttattctagccaacagttactttgttccctccacattctctttgaaatagtcaaacgtatccaatcatgcatgtctgttctgatcataacagcaaaagcatgtgtatagaaaattgatagttgaattagagtcattttccataaaaaaatattcaataagtgtgacattatttttcgtatgaattaatccattttttgctgatttgagattctttctttctttgcttcttgctttccttcatcagccattttttttgttttctctttctctctctcttcttgattca

SEQ ID NO: 642 - DNA, 4171 bp, synthetic construct
  source 1..4171: mol_type = other DNA
gcatgcatatagctctatttctttagtaatgttacacctgcacgatgtccataataatagaagtcataatacatatacagattaaaattaaataaacaatttctaatcaaatttaaaaatgtcaacttaatttcattattaaaatataacaatatgaataaccaaaaataaattaagacattcacccccccccccccgaaaagaaatttaagacaattacaattttttggtatatatattaaagacttccaattatggacataggatctcaacttagtaatcttcactttaggaaagtcttttccccacaagtcacaaccatctattaatatcaatacaaaatgaagtcaactcaataaaaagatccttttataggaaattgatgaataaaactgatatatatttcagttaaaattgttcaaacattagtgcaatggacagaagtatcctttgtgccctcatttgccaacaactggctcatcaagcaataaattaattcgccatttccaaacttttgcagttttaagtagaagatatccattcgttgaaactttcttcacaccaccaatttcctcctaaatgggttaacaaatgtgcaatgatcgaaatatatagttgaaacgatcaagatcctctcaatggtaaaagaatttgaccacgctaagttttattatctcactagctattaatttaattatcatttatcttttcaattattaaacacacaaataatcaatcctaaaatgatgaaacttgacatggtctatttttacaataacttaaccaaaaacttataagttagcaactttcaaaaacaggttttcccttgttaagaatagacaaatcaaatggagtgtgttaaatattgtgtttaaaatagtgtgttgcaagcatttctcttataaaaaatcagtataaatatgtttggaactgtttattttagtttatcttatattataaatacaaaacaagtgtttggtaaagctaatgaaaataacttaaaacatacctatggtttgtcggatgtgtcgcgggtggagctccttgccattttgtgtggcctttgtatgtgttgagatatggccatgggttattgtagaatccttcttcttttggattcttctttgttcctgtctctcattcaacgctcatgttacccatttcatccatgccaagttttttttatacatgcatctaaattttttccgccatatcttaattttgtttttattaaaattaaaaagaatatgattgaatgtcaatgtaaattttttttacacagacaatgcatatccattaaggtttgttagaattacactccaccccatttttatctaaaatctacatcccaccccattttatatagaggcaaatttagtgacgaaaaatattcttcattaataattagttattatttaaattgttaatcaataatttcaaaaaaaaattcaatataatccaataaatttaaaaatgaaaacatcacaatcctcctcattctctcaatcgcgttttacctccgtaaatttacaatgcaaattatgcaatagcacacctgcccgatttacaaaccatatttcgaacatagtgaaacatgcttgtgttttcatatttggtgataattcaattttaatcaaaataatctctttatacctccaattttcaaaattgggttgtaggccaaaaaagcaacacaaatgggtgaagaaaatagagaaacaaaattatgaaaatatgaagtggatctgaggttattagagcccaacgaggcggtggagcatcgtttttaacaaaatccaacaatatctttaggggtgaaatccaccaaccgagcgttcgctcacaacttaaaggggtgaaattcacaagaagtagtttaaaggggtgaaattcacaagaagtagttgaacaagtgactttaggaatgtgcgattcacgttctggggttcaggtcgcaacaaaactttgaggcatggtggtgccatgtggtttcacattgtcggacagtggagccgtgttaaagggagtaaaggcttggtggtggccgtttgtggtgaaaaatatgatttggagatagatgggacgtggacttaacagacagagtggatggtttttttttaaatttaattcagtaaaattatttttataaattaatgtatgatagtgtatatgcattaaatttatttaaatttttactaattagtaatttgtttttagtagtgacgaatttgtttttgtcactaaattttgcctttataaaaaatggggtggagtgtagatttttaaaaagaatggggtggagtgtcattcttgcaaatcttgaggggggtgagtgtattttactcaactcttaaaaaaattaggaattaattagttgtaaattataaaagtttatttcattgaataacataacaaattaaaggcaaaaaaatacaaaacttcattttatatgtatttcagaaaaattgcctactttcaattatgagaaactaaaattatgtttagtttaaaatgagcatagattcaaaaattaataaataatatatatagcaggatacatgcctatcaattaacatatcgtttgtccacgatgatgatcttattggaggatcaatatcttcaaattaacaaagttatcacttggctcttattggtcataatgcaataaaaaaattgcaattagtatcaaatcaaactgaaatttgcaactatatgctgctggtgttgtcgcgcagattcctttttgatttttatgggaatgaagtcaatgaagcaacagtttcacaggcgtgcttaaaaataaaaaaattggaaatttgatgtttgttaggattatgagaggacacaatgggaggatgtttcacaagctgcagacagggttgccacttcagatgcaaaggattaaataaacaaagccaaggtttgcaatcaacaagattccatcgtcgttttgcttcctttaatcgtattaatcaaaagcacaccaagtaaagcatcaatatataacatccaagaaatcacaacatgatagttgctcgtgtcgtctattaactatgatgtcaggagttcgatccccgctcatgtgaatggaagtcatttcgttgttagatgtttaccgtttaatgcaaatactcgcggtgagataataagtcattgttgtgggcgaataccctaaaataagaataaaattaaatatagcatccaagttattgcccaaatatataaacaatggtattgttgacattattaggcataaaagcagtaggtaagtgtattatatttatttaattttttaaaattttgaaattaattaataattgttaacataagtaaaccatttttagcaaaaactctacacttctattaccttaacaagtacatttttgatggtacaccttaacaattaacaagtcatatgattgacaaacatattttatatgctttacaatttattctaaaatcaaagtttatgggaagaagctcataaaagtagttcctgggtgttttttagaatagagaagttgatcatgttagaaattaagttaaaaatgagttgaaagtgatttatgtttgattatatttatgagaaaaatgaattgtctgatgtaatattgtaaaatctaacaattaattaagtaccacagaaactagaatttatagcttcaccttagaattgattttggagttaaaatcaattattaaaggagcaattattaaaggagacatccaaatacactagttaattttgacaatcaattctaacacttgcaaatgtgtaaccaaacttactatcagtaagtgaactaatgattcccaagtcaacttttgttctagctagccaaccgttactatgttccctccacaatacattctccttgaaactgtcaagtgtcaactgcacccaaacatccttgtttgtgatgaaaagatcgaaaacgtgtgcttatgaatttacatgtttacattcaccaaaaatcaaaagttacacctctatacttatcacatatgtttgagtcactttccatataaaatcccatagtctattaattatcagagtaagtgtgacattagtttcaagagaaaaataaatgatcaaaacctggtagagagtcctagaaattcaatgttctgatttctttcattcatctctgctgccattttgatttgcaca

SEQ ID NO: 643 - DNA, 20 bp, synthetic construct
  source 1..20: mol_type = other DNA
caatgtatgtctcaccactt

SEQ ID NO: 644 - DNA, 20 bp, synthetic construct
  source 1..20: mol_type = other DNA
caatgtattttttaccactt

SEQ ID NO: 645 - DNA, 30 bp, synthetic construct
  source 1..30: mol_type = other DNA
ctatccttgtctctttctgtctctcattga

SEQ ID NO: 646 - DNA, 30 bp, synthetic construct
  source 1..30: mol_type = other DNA
ctatccttttttttttctttttttcattga

SEQ ID NO: 647 - DNA, 31 bp, synthetic construct
  source 1..31: mol_type = other DNA
ccgggattccgctatggtcagcaggttgatg

SEQ ID NO: 648 - DNA, 30 bp, synthetic construct
  source 1..30: mol_type = other DNA
cgcctcgagcagaatgcttgtaacacccag

SEQ ID NO: 649 - protein, 77 aa, synthetic construct
KRRTKAEKTISLEVLRQYFAGSLKDAAKSLGVCPTTLKRICRQHGISRWPSRKIKKVNHSLKKLQLVIDSVQGAEGA
